(19) United States
(12) Patent Application Publication
(10) Pub. No.: US 2023/0049887 A1
(43) Pub. Date: Feb. 16, 2023

(54) COMPOSITIONS AND METHODS FOR PRODUCING FOOD PRODUCTS WITH RECOMBINANT ANIMAL PROTEIN

(71) Applicant: Bond Pet Foods, Inc., Boulder, CO (US)

(72) Inventors: Karin Pernilla Turner Audibert, Golden, CO (US); Richard W. Kelleman, II, Denver, CO (US); Anthony George Day, San Francisco, CA (US); Julie Marie Struble, Bothell, WA (US); Ryan Michael Yamka, Trumbull, CT (US); Catherine Asleson Dundon, Englewood, CO (US); Luis N. Brandao, Aurora, CO (US)

(21) Appl. No.: 17/427,046

(22) PCT Filed: Jan. 29, 2020
(86) PCT No.: PCT/US20/15734

§ 371 Date: Jul. 29, 2021

Related U.S. Application Data
(60) Provisional application No. 62/798,447, filed on Jan. 29, 2019.

(51) Int. Cl. A23J 3/04; C07K 14/47; A23L 13/00; C12N 15/85; A23K 10/20

(52) U.S. Cl. CPC A23J 3/04; C07K 14/47; A23L 13/00; C12N 15/85; A23K 10/20

(57) ABSTRACT

The invention relates to methods and compositions for the recombinant production of animal protein for use in animal food, particularly pet food.

### 1. CROSS REFERENCE TO RELATED APPLICATIONS

[0001] This application claims priority under 35 USC § 119(e) to U.S. Provisional Patent Application No. 62/798,447 filed on Jan. 29, 2019, which is incorporated by reference in its entirety.

### 2. SEQUENCE LISTING

[0002] Incorporated by reference in its entirety herein is a computer-readable nucleotide/amino acid sequence listing submitted herewith and identified as follows: 1,777,447 Byte ASCII (Text) file name “513482_ST25” created on Mar. 18, 2022.

### 3. BACKGROUND

[0003] Currently, the production of high-quality protein foods and feed includes animal meat. As the global human and companion animal populations increase, the demand for high-quality protein food is expected to increase. However, obtaining proteins from animal meat for food production is an environmentally demanding, and potentially destructive, process.

[0004] While plant sources, e.g. legumes, contain a significant amount of protein, they often lack one or more essential amino acids for many mammalian diets [4] or they not as bioavailable as animal protein, making plant protein insufficient or sub-optimal alternative for many food applications. In fact, tryptophan and lysine are scarce in corn, lysine in wheat and other cereals, and methionine in soybeans and other legumes [6]. In addition, plant sources also contain anti-nutritional factors like fiber, phytate, and protease inhibitors, that limit digestion and absorption [1],[2]. Soybean, a commonly used protein source, decreases the digestibility in canine foods when present in concentrations over 15% [3]. Moreover, humans and companion animals have different amino acid requirements.

[0005] Hence, there remains a need for a source of proteins that do not come from animal meat yet satisfy the growing demand for high-quality protein food products and deliver on a multitude of nutritional needs.

### 4. SUMMARY

[0006] Disclosed herein are food compositions made with recombinantly produced animal proteins and methods for producing the recombinant animal proteins. Nucleic acid molecules encoding the animal proteins, expression vectors, recombinant host cells, and methods for making the animal proteins are also provided.

[0007] The recombinantly-produced animal proteins of the disclosure can be incorporated into food or feed product as whole cells, protein concentrates from cell lysates and/or cell supernatants, or as protein isolates to make various food products (e.g., primary diet foods, secondary diet foods), intermediate food products, supplements, and pharmaceutical compositions. The recombinant animal protein compositions may be mixed with other ingredients, shaped into a suitable form factor, to generate food products with a taste and mouthfeel suitable for humans or companion animals (e.g., dogs, cats, ferrets and the like).

[0008] Disclosed herein are improved methods and compositions for manufacturing food for animals, particularly companion animals. In certain embodiments, the methods entail producing animal proteins recombinantly in a microbial host, as described herein. The recombinant proteins produced by the method can provide equivalent or better nutrition than conventionally harvested animal proteins or plant-derived proteins, without the associated deficiencies described above. In certain embodiments, the recombinant animal proteins described herein can also be incorporated into or serve as food for humans, wild animals, livestock, domestic pets, companion animals, and/or zoo animals. In preferred embodiments, the food composition is substantially free of antibiotics, animal growth hormones, and/or meat from farmed, caught or slaughtered animals.

[0009] One or a plurality of recombinant proteins can be produced in one organism, or one strain, thereby allowing the amino acid profile to be tailored to the particular nutritional needs of targeted companion and other animals, including humans. Alternatively, a single recombinant animal protein can be produced in one strain (or organism) and mixed with a protein or proteins produced in a different strain (or organism) to yield a final product with the desired proportions of amino acids and other nutrients. Thus, the amino acid profile (and/or the profile of other nutrients) can be customized for the targeted animal, including pets and humans.

### 5. BRIEF DESCRIPTION OF THE DRAWINGS

[0010] FIG. 1 is a photograph of an SDS-PAGE gel of proteins extracted from an S. cerevisiae host cell strain that expresses a chicken cofilin-2 protein, with the chicken cofilin-2 band identified.

[0011] FIG. 2 shows the growth curves of an S. cerevisiae host cell strain that expresses chicken cofilin-2, and a control S. cerevisiae strain that does not express chicken cofilin-2, each grown under two different media conditions, (i) raffinose alone or (ii) raffinose with galactose to induce protein expression.

[0012] FIG. 3 shows maximum specific growth rates (μmax [h⁻¹]) from the experiments shown in FIG. 2. The error bars shown are standard deviation.

[0013] FIG. 4 is a picture of an SDS-PAGE gel of proteins extracted from an S. cerevisiae host cell strain that expresses chicken profilin protein, with the profilin band identified.

[0014] FIG. 5 is a picture of an SDS-PAGE gel of proteins extracted from an S. cerevisiae host cell strain that expresses chicken profilin protein that was used to make theoretical calculation shown in Table 4.

[0015] FIG. 6 shows the growth curve of an S. cerevisiae host cell strain expressing chicken profilin, and a control S. cerevisiae strain that does not express chicken profilin, each grown under two different media conditions, (i) raffinose alone or (ii) raffinose with galactose to induce protein expression.

[0016] FIG. 7 shows maximum specific growth rates (μmax [h⁻¹]) from the experiments shown in FIG. 6. The error bars are standard deviation. The asterisk denotes P value <0.05

[0017] FIG. 8 shows a picture of dried pellet from whole-cells expressing a recombinant profilin protein from chicken.

[0018] FIG. 9 shows a picture of the mixed, dry ingredients with a recombinant chicken profilin protein, processed into a powder.

[0019] FIGS. 10A-10B show pictures of processing a dough containing a recombinant animal protein into a food product. 10A shows a picture of processing of the wet and dry ingredients into a dough. 10B shows a picture of the molding the dough into a form factor of a treat.

[0020] FIGS. 11A-C show a picture of the dried and packaged treat with different protein content.

[0021] FIG. 12 shows a picture of an SDS-PAGE gel of a chicken coronin protein expressed in an S. cerevisiae host cell strain.

[0022] FIG. 13 shows a picture of an SDS-PAGE gel of a turkey myozenin-1 protein expressed in an S. cerevisiae host cell strain.

[0023] FIG. 14 shows a picture of an SDS-PAGE gel of a pig troponin C protein expressed in an S. cerevisiae host cell strain.

[0024] FIG. 15 shows a picture of an SDS-PAGE gel of a chicken cofilin-2 protein expressed in a K. phaffii host cell strain.

[0025] FIG. 16 shows a picture of an SDS-PAGE gel of a chicken profilin protein expressed in a K. phaffi host cell strain.

[0026] FIG. 17 shows a picture of an SDS-PAGE gel of chicken profilin protein expressed in a K. lactis host cell strain.

[0027] FIG. 18 shows a picture of an SDS-PAGE gel of a chicken profilin protein expressed in an S. pombe host cell strain.

### 6. DETAILED DESCRIPTION OF THE INVENTION

### 6.1. Definitions

[0028] Unless otherwise defined herein, all technical and scientific terms used herein have the meaning commonly understood by a person skilled in the art to which this invention pertains.

[0029] The term “ameliorating” refers to any therapeutically beneficial result in the treatment of a disease state, e.g., a nutritional deficiency disease state, including prophylaxis, lessening in the severity or progression, remission, or cure thereof.

[0030] The term “mammal” as used herein includes both humans and non-humans and includes but is not limited to humans, non-human primates, canines, felines, murines, bovines, equines, birds, and porcines.

[0031] The term “percent identity”, in the context of two or more nucleic acid or polypeptide sequences, refers to a specified percentage of nucleotides or amino acid residues that are identical as between or as among the sequences when aligned for maximum correspondence. Optimal alignment of sequences for comparison can be conducted, e.g., by the local homology algorithm of Smith & Waterman, Adv. Appl. Math. 2:482 (1981), by the homology alignment algorithm of Needleman & Wunsch, J. Mol. Biol. 48:443 (1970), by the search for similarity method of Pearson & Lipman, Proc. Nat'l. Acad. Sci. USA 85:2444 (1988), by computerized implementations of these algorithms (GAP, BESTFIT, FASTA, and TFASTA in the Wisconsin Genetics Software Package, Genetics Computer Group, 575 Science Dr., Madison, Wis.), or by visual inspection (see generally Ausubel et al., infra) Unless otherwise specified, “percent identity” is assessed herein using the BLAST algorithm, which is described in Altschul et al., J. Mol. Biol. 215:403-410 (1990). Software for performing BLAST analyses is publicly available through the National Center for Biotechnology Information (www.ncbi.nlm.nih.gov/), and unless otherwise specified, “percent identity” is measured using BLASTP or BLASTN with default parameters at (www.ncbi.nlm.nih.gov). Depending on the application, the percent “identity” can exist over a region (e.g. a fragment) of the sequence being compared, e.g., over a functional domain, or, alternatively, exist over the full length of the two sequences to be compared.

[0032] The term “sufficient amount” means an amount sufficient to produce a desired effect, e.g., an amount sufficient to modulate protein aggregation in a cell.

[0033] The term “therapeutically effective amount” is an amount that is effective to ameliorate a symptom of a disease. A therapeutically effective amount can be a “prophylactically effective amount” as prophylaxis can be considered therapy.

[0034] The term “nutritional supplement,” as used herein, generally refers to a substance capable of supplementing a diet of a human, dog, cat, or other animal. A nutritional supplement may provide essential nutrients (e.g., vitamins, minerals, macronutrients, trace nutrients, and/or cofactors). A nutritional supplement may be a dietary supplement.

[0035] The term “flavoring agent,” as used herein, generally refers to a substance capable of altering a flavor of a food product. A flavoring agent may include a flavoring molecule(s) or precursor(s), such as, for example, carbohydrates (e.g., sugar), sweeteners, or salts.

[0036] The term “recombinant host cell” as used herein refers to a host cell(s) that have been genetically modified to express or overexpress endogenous polynucleotides, to express heterologous polynucleotides or polypeptides, such as those included in an expression vector, in an integration construct, or which have an alteration in expression of an endogenous gene. By “alteration” it is meant that the expression of the gene, or level of a RNA molecule or equivalent RNA molecules encoding one or more polypeptides or polypeptide subunits, or activity of one or more polypeptides or polypeptide subunits is up regulated or down regulated, such that expression, level, or activity is greater than or less than that observed in the absence of the alteration. For example, the term “alter” can mean “inhibit,” but the use of the word “alter” is not limited to this definition.

[0037] The term “heterologous” as used herein indicates molecules that are expressed in an organism other than the organism from which they originated or are found in nature. The molecule can have a coding region that is different from the host cell or a promoter region that is different from the host cell, or both.

[0038] On the other hand, the term “native” or “endogenous” as used herein indicates molecules that are expressed in the organism in which they originated or are found in nature, independently of the level of expression that can be lower, equal or higher than the level of expression of the molecule in the native host cell. It is understood that expression of wild-type enzymes or polynucleotides may be modified in recombinant host cells.

[0039] The term “transformation” refers to the transfer of a nucleic acid fragment into a host organism, resulting in genetic inheritance. Genetic inheritance can be stable or unstable. Host cells (e.g., eukaryotic cells) containing the transformed nucleic acid fragments are referred to as “transgenic” or “recombinant” or “transformed”.

[0040] The term “primary food product” or “primary diet food product” as used herein indicates a food product that is the core source of daily nutrition such as a complete meal or feed.

[0041] The term “secondary food product” or “secondary diet food product” as used herein indicates a food product that is generally not the core source of daily nutrition. By way of example, a secondary food product can be a snack, a treat, or an edible toy.

[0042] The term “intermediate food product” as used herein indicates a food product that is added to make the ultimate ingestible food composition. The intermediate food product is typically in a format that allows it to be mixed, coated, soaked, or injected to make the ultimate ingestible food composition.

[0043] The term “supplement” as used herein indicates a nutritional product that is intended to add or enhance the nutrient intake. The supplement can typically be in the form of a pill, a capsule, a tablet, a liquid, a soup, broth, or a dissolvable powder.

[0044] The term “substantially free” refers to a composition that comprises a desired compound, desired compounds, and inert compounds and is free of significant quantities of an undesired compound or undesired compounds. A typical substantially free composition comprises greater than about 80% by weight of the desired compound, desired compounds, and inert compounds and less than about 20% by weight of one or more other undesired compounds, more preferably greater than about 90% by weight of the desired compound, desired compounds, and inert compounds and less than about 10% by weight of one or more other undesired compounds, even more preferably greater than about 95% by weight of the desired compound, desired compounds, and inert compounds and less than about 5% by weight of one or more other undesired compounds, and most preferably greater than about 97% by weight of the desired compound, desired compounds, and inert compounds and less than about 3% by weight of one or more other undesired compounds.

[0045] The term “about” is used herein to mean approximately, in the region of, roughly, or around. When the term “about” is used in conjunction with a numerical range, it modifies that range by extending the boundaries above and below the numerical values set forth. In general, the term “about” is used herein to modify a numerical value above and below the stated value by a variance of 10%.

[0046] The term “robust protein expression” is used herein to mean an increase in protein yield. Robust protein expression can arise from modifications in the protein itself or the host cell it is expressed by (also called biological or genetic robustness), or a combination of both.

[0047] The term “non-recombinant protein” or “supplementary protein” is used herein to mean a protein that is not produced by a recombinant technology such as for example, inserting a heterologous gene in a host cell to have the host cell produce the heterologous amino acid sequence, peptide, protein or fragment thereof.

[0048] It must be noted that, as used in the specification and the appended claims, the singular forms “a,” “an” and “the” include plural referents unless the context clearly dictates otherwise.

### 6.2. Recombinant Protein Compositions

[0049] 6.2.1. Animal Proteins

[0050] The disclosure provides various recombinant animal proteins for the inclusion into food for primarily humans and pets. It is contemplated that any recombinant animal protein can be used with the methods and compositions of the disclosure. Often the recombinant animal protein is a heterologous protein.

[0051] The recombinant animal protein used with the methods and compositions of the disclosure may be a full-length protein, a truncated protein, or a fragment of a protein. A fragment (or portion of a protein) is an amino acid sequence that has at least three amino acids of the full-length protein. In some embodiments, the full-length protein is produced by expressing fragments that cover the full-length protein.

[0052] In some embodiments, the amino acid sequence of the animal proteins may be modified by replacing one or more amino acids with a different amino acid (e.g., by changing the nucleotide sequence of the recombinant gene encoding the protein).

[0053] Such amino acid modifications may improve the yield of the animal protein (e.g., by more robust protein expression) produced by the host cell that has been engineered to express the protein. Any amino acid modification can be made that improves or enhances the production of the animal proteins. In some embodiments the modification is made in the protein encoding region of the animal protein. In other embodiments, the modification is made in a regulatory element that controls or modifies the expression of the animal protein. Non-limiting examples of such amino acid modifications are: improving the efficiency of transcription and/or translation of the animal protein, improving the stability of the animal protein, altering the rate at which the protein is secreted by the host cell or by changing the activity of the animal protein so any deleterious effects on the expression of the animal protein are minimized.

[0054] In some embodiments, the animal protein has a higher percentage of essential amino acids compared to other animal tissue proteins. In some embodiments, the animal protein comprises more than 1%, 2%, 3%, 4%, 5%, 6%, 7%, 8%, 9%, 10%, 11%. 12%, 13%, 14%, 15%, 20%, 25%, 30%, 31%, 32%, 33%, 34%, 35%, 36%, 37%, 38%, 39% or 40% essential amino acids compared to other animal tissue proteins.

[0055] Depending on the host cell used, it may be helpful to select an animal protein that has a certain percentage of sequence identity to the proteins derived from the host cell. In some embodiments, the animal protein has 0%, 1%, 2%, 3%, 4%, 5%, 6%. 7%, 8%, 9%, 10%, 11%, 12%, 13%, 14%, 15%, 16%, 17%, 18%, 19%, 20%, 21%, 22%, 23%, 24%, 25%, 26%, 27%, 28%, 29%, 30%, 31%, 32%, 33%, 34%, 35%, 36%, 37%, 38%, 39%, 40%, 41%, 42%, 43%, 44%, 45%, 46%, 47%, 48%, 49%, or 50% sequence identity to a gene or a region of a gene derived from a host cell. In some embodiments the animal protein has 0%, 1%, 2%, 3%, 4%, 5%, 6%, 7%, 8%, 9%, 10%, 11%, 12%, 13%, 14%, 15%, 16%, 17%, 18%, 19%, 20%, 21%, 22%, 23%, 24%, 25%, 26%, 27%, 28%, 29%, 30%, 31%, 32%, 33%, 34%, 35%, 36%, 37%, 38%, 39%, 40%, 41%, 42%, 43%, 44%, 45%, 46%, 47%, 48%, 49%, or 50% sequence identity to a protein or a fragment of a protein derived from a host cell.

[0056] Non-limiting examples of animal proteins that can be used with the disclosure are: troponin I, actin, myosin, alpha-actinin-2, alpha-actinin-3, titin, receptor tyrosine protein kinase skeletal muscle, myosin binding protein C, F-actin-capping protein, Myosin-binding protein H, troponin T, myotubularin 1, myozenin-1, beta-enolase, cofilin-2, PDZ and LIM domain protein 7, twinfilin-2, telethonin, M-protein striated muscle, coronin, nebulin-related-anchoring protein, myopalladin, tensin, gelsolin, dystroglycan, profilin, myozenin-2, calsarcin 1, myotilin, paxillin, integrin alpha-7, integrin beta-1, dystrophin, ankyrin, paranemin, myomesin (skelemin), alpha sarcoglycan, gamma sarcoglycan, or calponin.

[0057] Examples of animal muscle proteins (or relatives of those proteins) that can be used with the disclosure include but are not limited to: thymosin beta 4, metavinculin, parvalbumin beta, tripartite motif-containing protein 54, obscurin, muscle M-line assembly protein unc-89, muscle-type aldolase, SERCA1, calponin homology-associated smooth muscle protein, skeletal muscle ankyrin repeat protein, calpain-3, atrogin-1, striated muscle-specific serine/threonine-protein kinase, skeletal muscle LIM-protein 2, glycogen phosphorylase, serpin A3-1, cadherin, beta-taxilin, density-regulated protein, synaptopodin, ARP2/3, WASP, SCAR/WAVE, IQGAP, AbpI, cortactin, drebrin, ENA/VASP, annexin II, BPAG, ERM protein, Sla2, utrophin, Srv2/CAP, verprolin, formins, capZ, fragmin, villin, AIP1, adducin, MACF, MAP2, tau, fimbrin, scruin, espin, fascin, actinfilin, actinogelin, Arklp, Prklp, actobindin, actolinkin, alpha-parvin, actophorin, acumentin, scinderin, afadin, AFAP-110, affixin, aginactin, angiogenin, dystonin, anilin, archvillin, cortactin, caltropin, CARMIL, caerin-1.16, dematin, diaphanous, EF-1a, EF-1b, LIM domain and actin-binding protein, elongation factor 2, epsin, proheparin-binding EGF-like growth factor, Mitogen-activated protein kinase, frabin, four and a half LIM domains protein 3, FH1/FH2 domain-containing protein 3, GAS2-like protein 2, kettin, Kelch protein, limatin, PDZ and LIM domain protein 1, synaptopodin-2, prefoldin, presenilin I, receptor tyrosine-protein kinase erbB-2, protein kinase C, striated muscle-specific serine/threonine-protein kinase, rapsyn, shroom, smitin, smoothelin, or serine/threonine-protein phosphatase, laminin, sarcospan, dystrobrevin, syntrophin, dysbindin, dysferlin, or fukutin.

[0058] Preferred animal protein sequences are listed in Table 1. They are grouped according to the tissue in which they are highly expressed (known). If it is not known in what tissue a protein is expressed, the protein is grouped according to the tissue for which its expression is required (e.g., for normal development of the tissue). For example, it is known that myotubularin is required for normal skeletal muscle growth. Thus, it is grouped with the skeletal muscle proteins. Persons skilled in the art will appreciate that in some cases a protein can be expressed in one or more tissue types.

[0059] In certain embodiments, the food compositions described herein comprise one or more of the animal proteins set forth in Table 1. In related embodiments, the food compositions described herein additionally, or alternatively, comprise one more recombinantly expressed homologs of the animal proteins set forth in Table 1.

[0060] In other related embodiments, the food compositions described herein comprise one or more animal proteins that are at least 50%, 60%, 70%, 80%, 85%, 90%, or 95% identical, but less than 100% identical, to the proteins set forth in Table 1 (i.e., the protein sequences are modified to alter their amino acid content, e.g., to improve nutrition, to improve digestibility, to optimize expression or to optimize secretion).

[0061] In other related embodiments, the food compositions described herein comprise one or more animal skeletal muscle tissue proteins of Table 1, or one or more cardiac muscle tissue proteins of Table 1, or one or more smooth muscle tissue proteins of Table 1, or one or more of the skeletal/cardiac muscle tissue proteins of Table 1, or one or more of the skeletal/smooth muscle tissue proteins of Table 1, or one or more of the cardiac/smooth muscle tissue proteins of Table 1, or one or more of the skeletal/cardiac/smooth muscle tissue proteins of Table 1. In yet other related embodiments, the food compositions described herein comprise proteins from two or more of the above-mentioned categories of proteins described in Table 1.

[0062] In some embodiments, the animal protein is an actin cytoskeleton protein. In some embodiments, the actin cytoskeleton protein is a filament protein, a capping protein, an actin-binding protein, an actin-bundling protein, a monomer binding protein, a cytoskeletal linker protein, a membrane anchor protein, a stabilizing protein, a sidebinder protein, a signaling protein, a capping protein, a severing protein, or a myosin.

[0063] 6.2.2. Nucleic Acids Encoding the Animal Proteins

[0064] Production of a recombinant animal protein of the disclosure can be achieved by the manipulation of a gene that encodes an animal protein, which is then inserted in a host cell expression system such that it expresses large amounts of a recombinant gene that is converted into an animal protein using the host cell expression system. This process can include the transcription of the recombinant DNA to messenger RNA (mRNA), the translation of mRNA into polypeptide chains, which are ultimately folded into functional proteins and may be targeted to specific subcellular or extracellular locations depending on the sequence. However, an animal protein need not be folded or targeted to add to the nutritional value of a food product. Where the animal protein is a fragment or portion of an animal protein it may not be folded.

[0065] Genes encoding recombinant animal proteins can be obtained by taking a sample from an animal and extracting nucleic acids, such as mRNA, from that sample and then amplifying the gene by reverse transcription followed by PCR. The sample could be a tissue sample (e.g., muscle), a blood sample, mucus, skin, saliva, or hair. Another option is to have the gene synthesized by a company that performs such work.

[0066] Alternatively, where the genome sequence of the animal has been determined, the gene sequences (DNA/nucleotide sequences) or protein sequences of an animal can be obtained by searching appropriate databases (e.g., UniProtKB and NCBI). A polynucleotide can be obtained using chemical synthesis, molecular cloning or recombinant methods, DNA or gene assembly methods, artificial gene synthesis, PCR, or any combination of those.

[0067] In the case that there are not sequences available for an animal protein of interest, conserved regions can be used to amplify segments of the genes and the flanking regions can be sequenced in order to obtain the full-length sequence. Multiple sequence alignments of a specific protein in several different organisms will show where the conserved regions lie, and which are the most suitable stretches to use for primer design. Primers with alternative nucleotides can be used when needed.

[0068] The present invention provides codon-optimized nucleic acid encoding an animal protein for expression in a host cell. Codon-optimization for expression in a particular host cell can be determined by codon usage tables or by using a program that is instructed by an algorithm that identifies a region of sequence that can be optimized for protein expression in the host cell. Any commercially available optimization algorithm or any publicly available algorithms can be used with the disclosure. Using such programs, various improvements can be achieved to enhance expression of a recombinant animal protein as discussed herein. Specific examples of codon-optimization of animal protein gene sequences for certain host cells are provided herein.

[0069] The gene sequences that can be used with the methods and compositions of the disclosure are those encoding the types of proteins described herein. In some embodiments, the gene sequence may include non-coding introns. In some embodiments, the gene sequences may not include non-coding introns.

[0070] Depending on what method is used to produce a recombinant animal protein, a gene encoding the animal protein may further comprises one or more regulatory elements. Non-limiting examples of regulatory elements include but are not limited to such as a restriction enzyme site, a promoter, an enhancer, a signal sequence, a terminator, or a combination thereof

[0071] 6.2.2.1. Origin

[0072] The identification and cloning of an animal protein are discussed herein. The origin of the recombinantly expressed protein sequence (i.e., the species of animal from which the sequence to be recombinantly expressed is found in nature) can be any species within the biological kingdom of Animalia. Preferably, the origin of the recombinantly expressed protein sequence is a vertebrate animal, which can be a fish, a bird, a mammal, an amphibian, or a reptile. The origin may be a placental mammal, monotreme mammal, or marsupial mammal (metatheria). The origin may furthermore be a bird or another vertebrate from the reptile clade.

[0073] In some embodiments, the gene origin is a placental mammal, including but not limited to carnivores (including lion, bear, weasel, seal, wolf, coyote, fox), equidae (including horse and donkey), even-toed ungulates (including pig, camel, cattle, and deer), Afrotheria (including elephants, woolly mammoth, golden moles, and manatees), and Boreoeutheria (including primates, rabbits, hares, pikas, rodents, moles, whales, bats, dogs, cats, seals, and hoofed mammals).

[0074] In some embodiments, the origin is a monotreme mammal, including but not limited to platypus and echidna. In some embodiments, the origin is a marsupial mammal, including but not limited to koala, possums, tapirs, kangaroos, wallabies, and marsupial lions.

[0075] In some embodiments, the origin is a hoofed mammal, including but not limited to cattle, antelope, deer, reindeer, elk, sheep, goat, camels, carabao, yak, bison, buffalo, caribou, water buffalo, pig, horse, and donkey. In some embodiments, the origin is an endothermic vertebrate, classified as Ayes, including but not limited to chicken, turkey, duck, pigeon, penguin, ostrich, goose, pheasant, and quail.

[0076] In some embodiments, the gene origin is a reptile, including but not limited to alligators and crocodiles.

[0077] In some embodiments, the gene origin is an aquatic animal, including but not limited to shark, tuna, trout, salmon, herring, jacks, carp, catfish, cod, flounder, bass, tilapia, sturgeon, crab, lobster, shrimp, prawns, oysters, mussels, eels, shellfish, cuttlefish, starfish, crayfish, and jellyfish.

[0078] In some embodiments, the gene origin is an amphibian, including but not limited to frogs, salamanders, and toads. In some embodiments, the gene origin is an insect.

[0079] 6.2.2.2. Tissue Source

[0080] The recombinant animal protein may be from any organ or tissue of an animal, including, but not limited to proteins expressed in the brain, skin, scales, feathers, eyes, shells, hair, horns, ears, liver, heart, kidney, stomach, intestines, and muscle tissue (e.g., skeletal, smooth or cardiac).

[0081] In preferred embodiments, the recombinant animal proteins are muscle proteins. In some embodiments, the recombinant animal protein is cytoskeletal. In some embodiments, the actin cytoskeleton protein is a filament protein, a capping protein, an actin-binding protein, an actin-bundling protein, a monomer binding protein, a cytoskeletal linker protein, a membrane anchor protein, a stabilizing protein, a sidebinder protein, a signaling protein, a capping protein, a severing protein, or a myosin. In some embodiments, the recombinant animal protein is a myosin. In some embodiments, the recombinant animal protein is an actin.

[0082] The animal muscle proteins include those proteins normally found in animal muscle tissue (or relatives of those proteins). In addition to myosin and actin, these proteins include but are not limited to troponin, tropomyosin, alpha-actinin, beta-actinin, titin, connectin, skeletal receptor, myosin-binding protein, desmin, leiomodin, tubulin, myotubularin, myozenin, telethonin, calsarcin, myotilin, nebulin, nebulin-related anchoring protein, myomesin, vinculin, paxillin, beta-enolase, myotubularin, calponin, caldesmon, transgelin, tropomodulin, supervillin, gelsolin, twinfilin, profilin, caveolin, catenin, cofilin, capping protein, leiomodin, tensin, M-protein, radixin, filamin, keratin, myopalladin, calsequestrin, caveolae-associated protein, nebulette, coronin, talin, dystrophin, dystroglycan, integrin, ankyrin, syncoilin, smoothelin-like-1, spectrin, synemin, paranemin, ponsin, plectin, skelemin, sarcoglycan, LIM protein, myoblast determination protein, myocyte-specific enhancer, and myocilin.

[0083] 6.2.3. Expression Vectors

[0084] The disclosure also provides various expression vectors (e.g., constructs) comprising a genetic element (e.g., DNA, or cDNA) encoding for a protein derived from an animal. Depending on the host cell used for protein expression, a person skilled in the art of biotechnology will know the appropriate expression vector to use (e.g., plasmid, virus) with the regulatory elements (e.g., transcriptional start site, promoter, and the like) and genetic elements required for protein expression in a particular host cell. Specific examples of expression vectors that can be used with the disclosure are provided herein.

[0085] A genetic element is any coding or non-coding nucleic acid sequence. A genetic element can be a nucleic acid that codes for an amino acid, a peptide or a protein. Genetic elements may be operons, genes, gene fragments, promoters, exons, introns, regulatory sequences, or any combination of those. A genetic element includes an entire open reading frame of a protein, or the entire open reading frame and one or more (or all) regulatory sequences associated therewith. The genes may be codon-optimized for expression in a particular recombinant host cell (e.g., codon-optimized for yeast, insect, or mammalian host cell).

[0086] In some embodiments, an expression vector can comprise one genetic element. In some embodiments, an expression vector can comprise at least 2, 3, 4, 5, or 6 genetic elements. In some embodiments, an expression vector can comprise one regulatory element. In some embodiments, an expression vector can comprise at least 2, 3, 4, 5, or 6 regulatory elements. A person skilled in the art knows the payload limitations (e.g. kilobase pairs) for certain various expression vectors (e.g., cosmids, plasmids, etc).

[0087] The term “engineered” or “recombinant” refers to a cell into which a recombinant gene, such as, for example, a gene encoding an animal protein, or part of an animal protein, has been introduced. Therefore, engineered cells are distinguishable from naturally occurring cells that do not contain a recombinant gene that is introduced by transfection, transformation, cell fusion, mating or other techniques. Recombinantly introduced genes will either be in the form of a cDNA (i.e., they will not contain introns), a copy of a cDNA gene, genomic DNA (with or without introns; for expression in prokaryotic hosts, the DNA should be without introns), or will include DNA sequences positioned next to a promoter not naturally associated with the particularly introduced gene.

[0088] 6.2.3.1. Promoters

[0089] Disclosed herein are expression vectors comprising a genetic element encoding an animal protein or part of an animal protein and the use thereof for the recombinant expression of the animal protein.

[0090] The expression vector may further comprise a promoter. The promoter may be a constitutive promoter, an inducible promoter, or a hybrid promoter. Where overexpression of a protein is toxic to a host cell (e.g., reduces growth of the cell, kills the cell, or reduces protein expression) it may be preferable to use an inducible promoter.

[0091] In the expression vector, the gene construct and the method, the promoter may be a viral promoter, a prokaryotic promoter or a eukaryotic promoter. The promoter may be a synthetic promoter from a promoter library. The promoter may be any scientifically known promoter or a novel promoter. The promoter may be an engineered form of a known promoter or a hybrid promoter.

[0092] The eukaryotic promoter may be a fungi promoter, a plant promoter, or an animal promoter. The fungi promoter may be the promoter of the genes phosphoglycerate kinase (PGK, PGK1, PGK3), enolase (ENO, ENOl), glyceraldehyde-3-phosphate dehydrogenase (gpdA, GAP, GAPDH), hexokinase, pyruvate decarboxylase, phosphofructokinase, glucose-6-phosphate isomerase, 3-phosphoglycerate mutase, pyruvate kinase, triosephosphate isomerase, phosphoglucose isomerase, glucokinase, alcohol dehydrogenase promoter (ADH1, ADH2, ADH4), isocytochrome C, acidic phosphatase, galactose metabolism enzymes, GAL (GAL1, GAL2, GAL3, GAL4, GAL5, GAL6, GAL7, GAL8, GAL9, GAL10), alternative oxidase (AOD), alcohol oxidase 1 (AOX1)), alcohol oxidase 2 (AOX2), CUP1, AHSB4m, adhl+, AINV, alcA, AXDH, cellobiohydrolase I (cbhl), ccg-1, cDNAl, cellular filament polypeptide (cfp), cpc-2, ctr4+, dihydroxyacetone synthase (DAS), FMD, formate dehydrogenase (FMDH), formaldehyde dehydrogenase (FLD1), GAA, GCW14, glucoamylase (glaA, gla-1), invl, isocitrate lyase (ICL1), glycerol kinase (GUT1), acetohydroxy acid isomeroreductase (ILV5), β-galactosidase (lac4), LEU2, melO, MET3, MET25, KAR2, KEX2, methanol oxidase (MOX), nmtl, peroxin 8 (PEX8), pcbC, PET9, PH05, PH089, PYK1, phosphatidylinositol synthase (PIS1), RPS7, TEF, translation elongation factor 1 alpha (TEF1), sorbitol dehydrogenase (SDH), SSA4, THI11, homoserine kinase, XRP2, TPI, and YPT1, PHOS, CYC1, HIS3, ADC1, TAP1, URA3, LEU2, TP1, TDH1, TDH3, FBA1, ADR1, TPI1, or any combination of those.

[0093] The plant promoter may be the promoter of the gene phol, TPI, TPS1, and any combination of these.

[0094] The animal promoter may be a heat-shock protein promoter, proactin promoter, immunoglobulin promoter, or the promoter of the gene B2, HSP82, Ser1, triose phosphate isomerase (TPI1), or any combination of those. However, any promoters can be used if they drive the expression of recombinant proteins in a particular host cell.

[0095] 6.2.3.2. Selection Gene Marker

[0096] The expression vector may include a selection gene marker. For example, an expression vector may comprise an auxotrophic marker. Non-limiting examples of auxotrophic markers that can be used with the disclosure include trp1, leu2, his3, adel, arg4, his4, ura3, and/or met2. In some embodiments, more than one selection gene marker may be used.

[0097] In some embodiments, the expression vector may comprise a selectable marker, which may be an antibiotic resistance gene. The resistance gene may confer resistance to drugs including, but not limited to, zeocin, ampicillin, blasticidin, kanamycin, nurseothricin, chloroamphenicol, tetracycline, triclosan, or ganciclovir. In some embodiments, more than one resistance genes may be used. Yet, for some food compositions, it may be desirable not to use an antibiotic resistance gene for selection.

[0098] In applications when there are several animal proteins expressed, it may be useful to use one or more resistance genes in combination with one or more auxotrophic markers.

[0099] 6.2.3.3. Integration and Transformation

[0100] The compositions of the invention include a recombinant host cell transformed with an expression vector to express one or more recombinant animal proteins.

[0101] One or more expression vectors with the required genetic elements (e.g., regulatory elements or protein-encoding, genetic elements) may be integrated into a genome. In some applications, it may be desirable to integrate multiple copies of the same expression vector.

[0102] Alternatively, or in addition, the host cell may comprise multiple copies of an expression vector where the expression vector is not integrated into a genome.

[0103] Any small DNA molecule within a cell that is capable of being physically separated from chromosomal DNA and can replicate can be used with the methods and compositions of the disclosure. The expression vectors that can be used with the disclosure are a plasmid, a conjugative plasmid, a non-conjugative plasmid, a cosmid, a hybrid plasmid, a virus, a phage, or the like.

[0104] Host cells may be transformed or transduced to introduce the expression vector by transfection, infection, endocytosis, F-mating, mating, PEG-mediated protoplast fusion, Agrobacterium tumefaciens-mediated transformation, chemical transformation, electroporation, heat-shock transformation, biolistic transformation or any other method known in the art.

[0105] 6.2.3.4. Signal Peptide Sequence

[0106] The expression vector may further comprise a signal peptide sequence. A signal peptide, also known as a, signal sequence, targeting signal, localization signal, localization sequence, secretion signal, transit peptide, leader sequence, or leader peptide, may cause extracellular secretion of a protein.

[0107] Extracellular secretion of a recombinant animal protein from a host cell simplifies protein purification. Recovery of a recombinant animal protein from a cell culture supernatant may be preferable to lysing host cells to release a complex mixture of proteins including intracellular proteins of the host cell.

[0108] For some applications, secretion may reduce harmful effects that intracellular overexpression of a recombinant animal protein may have on a host cell such as toxicity or reduced growth rate.

[0109] Secretion may produce higher amounts of an animal protein compared to intracellular expression. Secretion of a protein may also enable post-translational modification (e.g., glycosylations) or aid in folding the protein correctly and allow for the formation of disulfide bonds.

[0110] 6.2.4. Host Cells

[0111] The expression vectors provided by the disclosure are transformed into host cells. Typically, the host cell is a eukaryotic host cell.

[0112] Any eukaryotic host cell known in the art can be used with the expression vectors and animal proteins provided by the disclosure to make a recombinant host cell. Examples of a eukaryotic host cell that can be used with the disclosure are an insect cell, a fungal cell, a plant cell, and a mammalian cell.

[0113] Genetic modification of the host cell is accomplished in one or more steps via the design and construction of appropriate vectors and transformation of the host cell with those vectors. Electroporation and/or chemical (such as calcium chloride- or lithium acetate-based) transformation methods can be used. Methods for transforming yeast strains are described in WO 99/14335, WO 00/71738, WO 02/42471, WO 03/102201, WO 03/102152 and WO 03/049525; these methods are generally applicable for transforming host cells in accordance with this invention. The DNA used in the transformations can either be cut with particular restriction enzymes or used as circular DNA.

[0114] The recombinant host cells can be cultured in appropriate media to produce large quantities of the recombinant animal protein.

[0115] 6.2.4.1. Yeast Host Cells

[0116] In some embodiments, the host cell used to express the protein is a yeast host cell. The yeast cell can be a budding yeast, fission yeast, or a filamentous yeast. In some applications, the yeast host cell is a wild-type yeast. However, often, the yeast host cell used with the method and compositions of the disclosure is a modified yeast host cell (e.g., through mutation, genome shuffling, protoplast fusion, cytoduction, etc.) to enhance the production or yield of protein, aid selection of, or any other modification that enhances production of the animal protein such that host cell gives more robust expression (i.e., strain robustness). The modification can result in a yeast host cell that is polyploid or aneuploid. In some applications, the host cell may be modified so that it grows faster, grows to a higher cell density, is less sensitive to environmental factors in the bioproduction process fluctuations such an unexpected change in temperature or reduced nutrients.

[0117] The yeast host cell may be obtained from a variety of sources known to people skilled in the art, including commercial sources. In some embodiments, the yeast host cell may be selected from the “Saccharomyces Yeast Clade”, as described in US Publication No. 2009/0226991.

[0118] In certain embodiments, the yeast host cell is a Saccharomyces sensu stricto yeast. The term “Saccharomyces sensu stricto” taxonomy group is a cluster of yeast species that are highly related to S. cerevisiae (Rainieri et al., 2003, J. Biosci Bioengin 96: 1-9). Saccharomyces sensu stricto yeast species include but are not limited to S. cerevisiae, S. kudriavzevii, S. mikatae, S. bayanus, S. uvarum, S. carocanis and hybrids derived from these species (Masneuf et al., 1998, Yeast 7: 61-72).

[0119] An ancient whole genome duplication (WGD) event occurred during the evolution of the hemiascomycete yeast and was discovered using comparative genomic tools (Kellis et al., 2004, Nature 428: 617-24; Dujon et al., 2004, Nature 430:35-44; Langkjaer et al., 2003, Nature 428: 848-52; Wolfe et al., 1997, Nature 387: 708-13). Using this major evolutionary event, yeast can be divided into species that diverged from a common ancestor following the WGD event (termed “post-WGD yeast” herein) and species that diverged from the yeast lineage prior to the WGD event (termed “pre-WGD yeast” herein).

[0120] In some embodiments, the yeast host cell may be selected from a post-WGD yeast genus, including but not limited to Saccharomyces and Candida. In some embodiments, post-WGD yeast species include: S. cerevisiae, S. uvarum, S. bayanus, S. paradoxus, S. castelli, and C. glabrata.

[0121] In some embodiments, the yeast host cell may be selected from a pre-whole genome duplication (pre-WGD) yeast genus including but not limited to Saccharomyces, Kluyveromyces, Candida, Pichia, Issatchenkia, Debaryomyces, Hansenula, Yarrowia and, Schizosaccharomyces. Representative pre-WGD yeast species include: S. kluyveri, K thermotolerans, K. marxianus, K. waltii, K. lactis, C. tropicalis, P. pastoris, P. anomala, P. stipitis, I. orientalis, I. occidentalis, I. scutulata, D. hansenii, H anomala, Y. lipolytica, and S. pombe.

[0122] A yeast host cell used with the disclosure may be either Crabtree-negative or Crabtree-positive, as described in US Publication No. 2009/0226991. A yeast microorganism may be either Crabtree-negative or Crabtree-positive. A yeast cell having a Crabtree-negative phenotype is any yeast cell that does not exhibit the Crabtree effect. The term “Crabtree-negative” refers to both naturally occurring and genetically modified organisms. Briefly, the Crabtree effect is defined as the inhibition of oxygen consumption by a microorganism when cultured under aerobic conditions due to the presence of a high concentration of glucose (e.g., 50 g glucose L⁻¹). In other words, a yeast cell having a Crabtree-positive phenotype continues to ferment irrespective of oxygen availability due to the presence of glucose, while a yeast cell having a Crabtree-negative phenotype does not exhibit glucose mediated inhibition of oxygen consumption.

[0123] In some embodiments, the yeast host cell may be selected from yeast with a Crabtree-negative phenotype including but not limited to the following genera: Saccharomyces, Lachancea, Kluyveromyces, Pichia, Issatchenkia, Komagataella, Yarrowia, Hansenula, Debaromyces, Ogataea, Zygosaccharomyces and Candida. Crabtree-negative species include but are not limited to: L. kluyveri (fka S. kluyveri), K. lactis, K. marxianus, P. anomala, S. stipitis (fka P. stipitis), I. orientalis, D. occidentalis, P. scutulata, P. anomala, Ogataea polymorpha, Arxula adeninivorans, Cyberlindnera jadinii, K. phaffii, Y. lipolytica, Kluyveromyces fragilis, D. hansenii, P. kudriavzevii and C. utilis.

[0124] In some other embodiments, the yeast host cell may be selected from yeast with a Crabtree-positive phenotype, including but not limited to the genera Saccharomyces, Kluyveromyces, Zygosaccharomyces, Naumovozyma, Lachancea, Dekkera, Candida, Pichia and Schizosaccharomyces. Crabtree-positive yeast species include but are not limited to: S. cerevisiae, S. uvarum, S. bayanus, S. paradoxus, N. castellii, L. thermotolerans, C. glabrata, Z. bailii, Z. rouxii, D. bruxellensis and S. pombe.

[0125] Another characteristic may include the property that the host cell is non-fermenting. In other words, it cannot metabolize a carbon source anaerobically while the yeast is able to metabolize a carbon source in the presence of oxygen. Nonfermenting yeast refers to both naturally occurring yeasts as well as genetically modified yeast.

[0126] In some embodiments, the recombinant host cells may be host cells that are non-fermenting yeast host cells, including, but not limited to those classified into a genus selected from the group consisting of Tricosporon, Rhodotorula, Myxozyma, or Candida. In a specific embodiment, the non-fermenting yeast is C. xestobii.

[0127] 6.2.4.2. Mammalian Host Cells

[0128] Cultured mammalian cell lines may also be used to express the animal proteins provided by the disclosure. In some embodiments, Chinese hamster ovary (CHO) can be used. In some embodiments, human cell lines such as HEK or HeLa may be used to produce protein. In some embodiments, a commercially available mammalian expression system can be used such Expi293, ExpiCHO, ExpiCHO, T-REx Expression System, Flp-In T-REx system, GeneSwitch System from Thermofisher.

### 6.3. Methods for Bioproduction

[0129] 6.3.1. Cell Culture Processes and Fermentation

[0130] The bioproduction of a recombinant animal protein may be conducted by cell culture processes or by fermentation. When fermentation is used, it may be conducted aerobically, microaerobically or anaerobically.

[0131] In some embodiments, the method for producing a recombinant animal protein for a food product consumption comprises (i) providing a reactor or flask comprising a fungal colony and (ii) a feedstock comprising a nitrogen-containing material and a carbon-containing material (e.g., sugar), and permitting the fungal colony to grow in presence of the feedstock to yield the fungus-containing product comprising a recombinant animal protein. In some embodiments, a selective media or reagent can be used to select for host cells harboring the recombinant animal gene.

[0132] In some embodiments, the method for producing a recombinant animal protein for a food product consumption comprises (i) providing a reactor comprising a fungal colony and (ii) a feedstock comprising a nitrogen-containing material and a sugar-containing material, and (iii) when the fungal colony reaches the exponential growth phase and an inducing agent is added to yield the fungus-containing product comprising a recombinant animal protein.

[0133] In some embodiments, the fungal colony comprises one or more budding fungi. Examples of preferred budding fungi are Saccharomyces cerevisiae, Schizosaccharomyces pombe, Komagataella phaffii, Kluyveromyces lactis, and a derivative thereof.

[0134] In some embodiments, the genome of a budding fungi can be genetically modified in at least one gene to yield more robust protein expression. Genetic modifications that can yield more robust protein expression are discussed herein. In some embodiments, the genome of a budding fungi can be genetically modified to be protease deficient.

[0135] In some embodiments, the fungal colony does comprise one or more filamentous fungi. Non-limiting examples of filamentous fungi that can be used are Aspergillus oryzae, Trichoderma reesei, Fusarium venenatum, Geotrichum candidum, Penicillium camemberti, Penicillium roqueforti, and a derivative thereof.

[0136] In some embodiments, the genome of a filamentous fungi can be genetically modified in at least one gene to yield more robust protein expression. Genetic modifications that can yield more robust protein expression are discussed herein. In some embodiments, the genome of a filamentous fungi can be genetically modified to be protease deficient.

[0137] In some embodiments, the recombinant animal protein is produced in a recombinant host cell and expressing the recombinant animal protein intracellularly. In some embodiments, the recombinant animal protein is produced in a recombinant host cell and expressing the recombinant animal protein such that it is secreted into the culture broth.

[0138] The recombinant animal protein may be obtained by a whole-cell preparation (i.e., host cell itself, and the recombinant protein expressed within or on its surface, can be added to the food composition), a protein concentrate preparation, or by isolating an animal protein. Depending on where the protein is expressed in the cell (e.g., extracellularly or intracellularly) protein concentrate can be from a cell lysate or a cell supernatant after centrifugation.

[0139] 6.3.2. Harvesting of Intermediate Food Product

[0140] The disclosure also provides methods for making an intermediate food product.

[0141] In some embodiments, the method comprises culturing eukaryotic host cell that recombinantly expresses a heterologous animal protein and harvesting the recombinant host cell, thereby making an intermediate food product.

[0142] In some embodiments, the method comprises culturing eukaryotic host cell that recombinantly expresses an animal protein, concentrating the recombinant host cell from the culture, extracting proteins in a protein concentrate from the concentrated culture, thereby making an intermediate food product.

[0143] In some embodiments, the method comprises culturing eukaryotic host cell that recombinantly expresses an animal protein, concentrating the recombinant host cell from the culture, and isolating the animal protein, thereby making an intermediate food product.

[0144] Where the animal protein is expressed intracellularly in the host cell, a cell lysate can be obtained from the eukaryotic host cell to make the intermediate food product. Where the animal protein is expressed extracellularly, the cell supernatant can be obtained the intermediate food product.

[0145] The intermediate food product can also be made in a format such that it is used to another food product. In some embodiments, the intermediate food product is harvested and made in the format an ingredient, a coating, a palatability agent, or a flavoring agent as discussed in more detail below.

### 6.4. Intermediate Food Products

[0146] The disclosure also provides various intermediary food products comprising the recombinant animal protein. The intermediary food product can be substantially free of an antibiotic, an animal growth hormone, animal meat, or proteins derived from animal meat.

[0147] The recombinant animal protein can be harvested and provided to the intermediary food product as a whole-cell food composition, a protein concentrates food composition, or as a protein isolate food composition. An intermediate food product can be mixed, coated, soaked or injected into an ultimate ingestible food product. The ultimate ingestible food product can be a commercially available feed, food, supplement, or treat.

[0148] In some embodiments, the intermediary food is a wet or dry ingredient that is added to another food product. The intermediary food can also be a coating to be added to the exterior of a food product. The coating can be soaked, brushed, or sprayed on a food product. In some embodiment the intermediary food protein can be a palatability agent that enhances the acceptance of the food product, as a flavoring agent or agent that enhances mouth-feel (e.g., texture and the like).

[0149] In some embodiments, the harvested whole cell, protein concentrate, or protein isolate can be concentrated and dried, thereby making a dry intermediate food product. A dry intermediate food product comprising the recombinant animal protein can be in the form of a powder, a granule, a pellet, a slurry or paste, of varying moisture content.

### 6.5. Food Product Compositions

[0150] The disclosure provides various food product compositions (for humans and pets) comprising the recombinant animal protein as well as supplements. The food product can be substantially free of an antibiotic, an animal growth hormone, animal meat, or proteins derived from animal meat. In some embodiments, the food product is substantially free of any other ingredient. In other embodiments, the food product is combined with other ingredients.

[0151] The recombinant animal protein-containing food product can be formulated as a primary diet food product for an animal or individual (e.g. that is, it acts as the core source of daily nutrition). Examples of a primary food product include but are not limited to a meal, a kibble, a wet food, a dry food (e.g., freeze-dried or dehydrated).

[0152] The recombinant animal protein-containing food product can be formulated as secondary diet food product (that is, it does not provide nutrients in the amounts that are required for daily nutrition for an animal or individual). Examples of a secondary diet food products are a snack, a treat, or an edible toy.

[0153] The recombinant animal protein-containing food product can also be made from an intermediary diet food product (e.g., ingredient, a coating, a palatability agent, or a flavoring agent) that is added to make an ultimate ingestible food product.

[0154] 6.5.1. Dry and Wet Food Products

[0155] The recombinant animal protein is introduced into a dry or wet food composition by addition of the intermediate food product, which can be a whole-cell food product, a protein concentrate food product, or as a protein isolate food product, thereby making a dry food product. In some embodiments, the dry food product can be further processed and shaped into a kibble, a treat, a snack, a chew, or an edible toy.

[0156] In some other embodiments, intermediate food product, which can be a whole cell, protein concentrate, or protein isolate can be concentrated, dried, and then rehydrated with one or more wet ingredients thereby making a wet food product. Wet products comprising the recombinant animal protein can be in the form of a slurry, a paste, a suspension, or a liquid. The wet food composition maybe semi-moist, intermediate moist, or moist. In some embodiments, the wet food composition can be further processed and shaped into a kibble, a treat, a snack, a chew, or a toy.

[0157] Depending on the percentage of essential amino acids desired for a food composition one can determine the amount of intermediate food product needed to achieve the desired amino acid content in the final food product (e.g. dry or wet food product). For example, the contribution of amino acids from profilin can be calculated for different expression levels (Table 4).

[0158] To carry out this example calculation, it was assumed that the total protein content per dry cell weight was constant. It was also assumed that profilin expression did not change the profile of endogenous cellular proteins, and that expression of endogenous proteins decreased (in percent) the same as profilin increased (on a mass basis). The current estimated expression level of profilin is 10% of the total protein. The level was calculated based on the intensity of the protein bands in FIG. 5 using the software Image J (Schneider, Rasband, & Eliceiri, 2012; NIH Image to ImageJ: 25 years of image analysis. Nature Methods, 9, 671-675).

TABLE 4
Increase in essential amino acids at different levels of profilin expression

| | Profilin expression level (wt % of total protein) | | | | | | | | | | |
|---|---|---|---|---|---|---|---|---|---|---|---|
| | 2% | 4% | 6% | 8% | 10% | 12% | 15% | 20% | 30% | 40% | 50% |
| | Increase in amino acid content per dry weight | | | | | | | | | | |
| Arginine | 0.23% | 0.47% | 0.70% | 0.93% | 1.17% | 1.40% | 1.75% | 2.34% | 3.51% | 4.67% | 5.84% |
| Histidine | −0.66% | −1.33% | −1.99% | −2.66% | −3.32% | −3.99% | −4.98% | −6.64% | −9.96% | −13.3% | −16.6% |
| Isoleucine | 0.39% | 0.79% | 1.18% | 1.57% | 1.97% | 2.36% | 2.95% | 3.93% | 5.90% | 7.86% | 9.83% |
| Leucine | −0.17% | −0.34% | −0.52% | −0.69% | −0.86% | −1.03% | −1.29% | −1.72% | −2.58% | −3.44% | −4.30% |
| Lysine | 0.15% | 0.30% | 0.44% | 0.59% | 0.74% | 0.89% | 1.11% | 1.48% | 2.22% | 2.96% | 3.70% |
| Methionine | 3.22% | 6.44% | 9.66% | 12.9% | 16.1% | 19.3% | 24.1% | 32.2% | 48.3% | 64.4% | 80.5% |
| Phenylalanine | 0.42% | 0.83% | 1.25% | 1.66% | 2.08% | 2.49% | 3.12% | 4.16% | 6.23% | 8.31% | 10.4% |
| Threonine | 0.97% | 1.94% | 2.92% | 3.89% | 4.86% | 5.83% | 7.29% | 9.72% | 14.6% | 19.4% | 24.3% |
| Tryptophan | 1.49% | 2.99% | 4.48% | 5.97% | 7.46% | 8.96% | 11.2% | 14.9% | 22.4% | 29.9% | 37.3% |
| Valine | 0.75% | 1.50% | 2.26% | 3.01% | 3.76% | 4.51% | 5.64% | 7.52% | 11.3% | 15.0% | 18.8% |

[0159] 6.5.1.1. Whole-Cell Food Products

[0160] The disclosure also provides a whole-cell food product compositions. The whole-cell food product composition is made with the host cell expressing the recombinant animal protein.

[0161] Host cells expressing recombinant animal protein may be harvested by batch centrifugation, continuous flow centrifugation, filter press, flocculation, rotary drum vacuum filtration, tangential flow filtration, ultrafiltration or combination of these methods or any technique known in the art.

[0162] Cells may be lysed by raising temperature, autolysis, by high-pressure homogenization (e.g., French press), ultrasonic cavitation, bead beating, rotor-stator processors, freeze-thaw cycles, enzymatic lysis (e.g., lysozyme, lysostaphin, zymolase, cellulose, protease or glycanase), osmotic shock methods, chemical lysis (by alkaline, detergent or organic solvent) or a combination of these methods or any technique known in the art.

[0163] In some embodiments, food product comprising the recombinant animal protein is a whole-cell food product. In some embodiments, the whole-cell food composition comprises about 1%, 2%, 3%, 4%, 5%, 6%, 7%, 8%, 9%, 10%, 15%, 20%, 25%, 30%, 35%, 40%, 45%, 50%, 55%, 60%, 65%, 70%, 75%, 80%, 85%, or 90% of recombinant animal protein by dry weight, semi-moist weight, or wet weight.

[0164] 6.5.1.2. Protein Concentrate Food Products

[0165] The disclosure also provides protein concentrate food product compositions. In some embodiments, the protein concentrate food product comprising the recombinant animal protein is made from a protein concentrate from a host cell expressing the recombinant animal protein.

[0166] Depending on whether the animal protein is expressed intracellularly or extracellularly in the host cell, the animal protein can be harvested from a cell lysate or cell supernatant of the host cell, respectively.

[0167] A protein concentrate can be purified from a host cell lysate or host cell supernatant by any technique known in the art.

[0168] In some embodiments, the protein isolate food composition comprises about 3%, 4%, 5%, 6%, 7%, 8%, 9%, 10%, 15%, 20%, 25%, 30%, 35%, 40%, 45%, 50%, 55%, 60%, 65%, 70%, 75%, 80%, 85%, or 90% of recombinant animal protein by dry weight, semi-moist weight, or wet weight.

[0169] 6.5.1.3. Protein Isolate Food Products

[0170] The disclosure also provides protein isolate food product compositions. In some embodiments, the protein isolate food product comprising the recombinant animal protein is made from a protein isolate from a host cell expressing the recombinant animal protein. Where a protein isolate is desired the gene encoding the animal protein will often further comprise a molecule tag or label that can facilitate the isolation of the animal protein. In some embodiments, one or more tags or labels can be used to isolate different animal proteins expressed in the same host cell.

[0171] Depending on if the animal protein is expressed intracellularly or extracellularly in the host cell, the animal protein can be harvested from a cell lysate or cell supernatant of the host cell, respectively. The animal proteins can be isolated using techniques known in the art.

[0172] In some embodiments, the protein isolate food composition comprises about 3%, 4%, 5%, 6%, 7%, 8%, 9%, 10%, 15%, 20%, 25%, 30%, 35%, 40%, 45%, 50%, 55%, 60%, 65%, 70%, 75%, 80%, 85%, or 90% of recombinant animal protein by dry weight, semi-moist weight, or wet weight.

[0173] 6.5.2. Other Ingredients

[0174] A recombinant animal protein of the disclosure may be combined with other ingredients such as fats, carbohydrates, supplemental non-recombinant proteins, fiber, nutritional supplements (e.g., minerals, and vitamins) to make a food composition.

[0175] In some embodiments, the recombinant animal protein of the disclosure may be combined with other ingredients to make a food product that meets the nutritional requirements of an animal (i.e., a nutritionally balanced food product). In some embodiments, the recombinant animal protein of the disclosure may be combined with other ingredients to make a food product more palatable to an animal or an individual.

[0176] In some embodiments, the recombinant animal protein of the disclosure may be combined with other ingredients to meet the nutritional requirements of an animal and to make it more palatable to an animal or an individual.

[0177] 6.5.2.1. Amino Acids

[0178] For some food compositions, such as a primary diet food, it may be desirable to combine the recombinant animal protein with additional amino acids. Any amino acid that makes a food composition nutritionally balanced for an animal can be added to a food composition of the disclosure. Examples of amino acids that can be added to a food composition of the disclosure include but are not limited to Arginine, Histidine, Isoleucine, Leucine, Lysine, Methionine, Methionine/Cystine, Phenylalanine, Phenylalanine/Tyrosine, Threonine, Tryptophan, and Valine.

[0179] 6.5.2.2. Fat and Carbohydrates

[0180] For some food compositions, it may be desirable to combine the recombinant animal protein with fat and/or carbohydrates.

[0181] Fat and carbohydrates are obtained from a variety of sources including but not limited to animal fat, fish oil, vegetable oil, meat, meat by-products, grains, other animal or plant sources, or any combination thereof.

[0182] In some embodiments, the food product can comprise omega-3 polyunsaturated fatty acids such as docosahexaenoic acid (“DHA”) or eicosapentaenoic acid (“EPA”) or a mixture of DHA and EPA.

[0183] Grains include but are not limited to rice, wheat, corn, barley, buckwheat, sorghum, oats, and quinoa. Other plant sources include but are not limited to pulses (chickpeas and different beans) and edible roots (e.g., potato, sweet potato, carrot, cassava, and turnips).

[0184] 6.5.2.3. Non-Recombinant Proteins

[0185] For some food compositions, it may be desirable to combine the recombinant animal protein with additional proteins (i.e., also referred to as “supplementary proteins” or “non-recombinant proteins”).

[0186] Such, supplementary proteins or non-recombinant proteins, can be obtained from a variety of sources including plants, animals, or microbes (unicellular and multicellular).

[0187] Supplemental proteins may also be obtained from an animal, which includes meat, meat by-products, dairy, and eggs. Meats include the flesh from poultry, fish, and animals such as cattle, swine, sheep, goats, deer, and the like. Meat by-products include but are not limited to kidneys, lungs, livers, stomachs, and intestines.

[0188] In some embodiments, the supplementary proteins may be free amino acids and/or peptides.

[0189] 6.5.2.4. Fiber

[0190] For some food compositions, it may be desirable to combine the recombinant animal protein with fiber. Fiber can be obtained from a variety of sources such as vegetable fiber sources, including but not limited to beans, cellulose, beet pulp, parsnips, broccoli, peanut hulls, carrots, spinach, and soy fiber.

[0191] 6.5.2.5. Nutritional Supplements

[0192] For some food compositions, it may be desirable to combine the recombinant animal protein with nutritional supplements. The nutritional supplement can be an antioxidant, a vitamin, a mineral, or a nutrient.

[0193] The nutritional supplements may be obtained from a variety of sources known to people skilled in the art including commercial sources. Vitamins and minerals can be added to a food product in amounts required to avoid deficiency and maintain health.

[0194] Non-limiting examples of nutrients that can be used with the disclosure include but are not limited to choline, thiamine, egg powder, manganese, methionine, cysteine, L-carnitine, lysine, and mixtures thereof.

[0195] Non-limiting examples of antioxidants include but are not limited to vitamin E, vitamin C, taurine, beta-carotene, and mixtures thereof.

[0196] Vitamins generally useful as food additives include vitamin A, vitamin B1, vitamin B2, vitamin B6, vitamin B12, vitamin D, vitamin E, biotin, vitamin K, folic acid, inositol, niacin, pantothenic acid, niacin, pyridoxine, choline, and mixtures thereof.

[0197] Minerals and trace elements useful as food additives include calcium, phosphorus, sodium, chloride, potassium, magnesium, iron, copper, zinc, selenium, iodine, and mixtures thereof. In certain embodiments, the food compositions can further comprise taurine.

[0198] 6.5.2.6. Palatability Agents

[0199] The food composition of the disclosure may comprise one or more palatability agents. The palatability agents are typically added to a food composition to enhance the overall palatability of the food to overcome any negative effects to flavor or smell.

[0200] The palatability agents may be added to enhance mouth feel or attractiveness of the food product, such as dyes or any other colorant that can change the color of the food composition.

[0201] A flavoring agent may be a flavoring molecule(s) and/or flavoring precursor(s). Flavoring agents may include carbohydrates, sugars, nucleic acids (e.g., nucleotides and/or nucleosides), free fatty acids, amino acids and/or derivatives, vitamins, minerals, antioxidants, or any combination thereof.

[0202] Carbohydrates and sugars may include but are not limited to, glucose, fructose, ribose, sucrose, arabinose, inositol, maltose, molasses, maltodextrin, glycogen, glycol, galactose, lactose, sorbitol, amylose, amylopectin, xylose, or any combination thereof.

[0203] Nucleic acids may include but are not limited to, inosine, inosine monophosphate, guanosine, guanosine monophosphate, adenosine, adenosine monophosphate, or any combination thereof. Free fatty acids may include but are not limited to, arachidic acid, behenic acid, caprylic acid, capric acid, cerotic acid, erucic acid, lauric acid, linoleic acid, myristic acid, palmitic acid, palmitoleic acid, stearic acid, lignoceric acid, or any combination thereof.

[0204] Amino acids and/or amino acid derivatives may include but are not limited to, cysteine, cystine, cysteine sulfoxide, allicin, selenocystein, methionine, isoleucine, leucine, lysine, phenylalanine, threonine, tryptophan, 5-hydroxy tryptophan, valine, arginine, histidine, alanine, asparagine, aspartate, glutamate, glutamine, glycine, proline, serine, tyrosine, taurine, or any combination thereof. Amino acids may be added to the food product as free amino acids or as amino acid derivatives. For example, any amino acid may be added to the food product as a free amino acid (e.g., pre-digested amino acids without other functional groups of chemical moieties).

[0205] Flavoring agents may include, but are not limited to retinol, retinal, beta-carotene, thiamine, riboflavin, niacin, niacinamide, nicotinamide, riboside, pantothenic acid, pyridoxine, pyridoxamine, pyridoxal, biotin, folates, cyanocobalamin, hydroxocobalamin, methylcobalamin, adenosylcobalamin, ascorbic acid, cholecalciferol, ergocalciferol, tocopherols (e.g., alpha-tocopherol), tocotrienols, phylloquinone, menaquinones, potassium, chlorine, sodium, calcium, phosphorus, magnesium, iron, zinc, manganese, copper, iodine, chromium, molybdenum, selenium, cobalt, or any combination thereof.

[0206] Antioxidants may include, but are not limited to, beta-carotene, alpha-tocopherol, quercetin, caffeic acid, propyl gallate, epigallocatechin gallate, or any combination thereof.

[0207] In some embodiments, zeolite is added to animal food compositions in amounts sufficient to enhance palatability. Preferably in amounts of zeolite that can be added to a food composition range from about 0.01% to about 4% by weight of the food composition.

[0208] 6.5.3. Pet Food and Feed Compositions

[0209] Various pet foods (companion animals) and animal feed (livestock, zoo animal) compositions are also provided. A pet food or animal feed composition can be made by combining a recombinant animal protein provided herein with a variety of other ingredients (as provide in Section 6.5.2) and/or additives or preservatives to generate a pet food or feed product. The one or more ingredients may be a wet ingredient, a dry ingredient, or other ingredients as provided herein, or any combination thereof. The pet food can be in various formats such as a kibble, a freeze-dried food product, a dehydrated food product, a baked food product, or raw formats.

[0210] 6.5.3.1. Food or Feed Formulations

[0211] The food or feed product can be made in various formulations. The amount of the other ingredients can be mixed with the recombinant animal protein to make the food or feed formulation will depend on the dietary requirements of a companion animal, livestock, zoo animal, which can depend on the species, age, size, weight, growth stage, health condition, and/or organ function (e.g., liver, heart, join, hip, or brain) of the animal.

[0212] In some embodiments, the pet food of feed comprising a recombinant animal protein is formulated to be nutritionally balanced. As used herein, the term “nutritionally balanced,” with reference to the pet food or feed composition, means that the composition has known required nutrients based on recommendations of recognized authorities in the field of pet nutrition.

[0213] For example, the recommended nutrients and their amounts have been established for various animals. See, National Research Council (NRC) provides recommended amounts of such nutrients for farm animals; nutrient Requirements of Swine (11th Rev. Ed., National Academy Press, Wash. D.C., 2012); Nutrient Requirements of Poultry (9th Rev. Ed., National Academy Press, Wash. D.C., 1994); Nutrient Requirements of Horses (6th Rev. Ed., National Academy Press, Wash. D.C., 2007), each of which are incorporated in their entirety.

[0214] The American Feed Control Officials (AAFCO) provides recommended amounts of such nutrients for dogs and cats. See American Feed Control Officials, Inc. (Official publication, 2018). In some embodiments, the food product comprises the AAFCO nutrient profile established for a dog. In some embodiments, the food product comprises the AAFCO nutrient profile established for a cat.

[0215] In some embodiments, the feed comprises at least the minimum or the maximum nutrient concentrations as established by NRC for various farm animals, pig, sheep, chicken, horse, goat, and the like.

[0216] Preferably, the food composition will include, by mass, 5-50% protein, 0.01-1.5% sodium, 0.01-1.5% potassium, 0-50% fat, 0-75% carbohydrate, 0-40% dietary fiber, and 0-15% of other nutrients.

[0217] The food product comprising a recombinant protein composition can be formulated into a breed-specific food formulation. In some embodiments, the proteins for breed-specific food formulations can be based on growth rate. See for example U.S. Pat. No. 5,851,573, which is hereby incorporated by reference in its entirety. In some embodiments, the proteins for breed-specific food formulations can be based on phenotypic characteristics of the animal. See for example U.S. Pat. No. 6,669,975, which is hereby incorporated by reference in its entirety. In some embodiments, the proteins for breed-specific food formulations can be based on genomic methods. See for example US Publication No. 20060045909, which is hereby incorporated by reference in its entirety.

[0218] In some embodiments, the food or feed product can be formulated into a product that improves health or wellness. In some embodiments, the food or feed further comprises a compound that improves joint function, skin health, coat or hair, brain development, or improves stool quality and/or stool frequency.

[0219] 6.5.3.2. Form and Shape

[0220] The pet food or feed product (dry or wet) can be in any form useful for feeding the food composition to an animal. The food product may be a shaped and/or molded or non-shaped product. For example, the food product may comprise shaped treats, kibble, edible granules, or made into a toy-shaped food product.

[0221] The pet food or feed product may be formulated for mouthfeel. Mouthfeel of the pet food product may be formulated according to its structure, dryness, density, adhesiveness, bounce, chewiness, coarseness, cohesiveness, fracturability, graininess, gumminess, hardness, heaviness, moisture adsorption, moisture release, mouthcoating, roughness, slipperiness, smoothness, springiness, uniformity, and viscosity.

[0222] The pet food or feed product may be formulated to have a porous, fibrous, or amorphous structure. In an example, the pet food product has a fibrous structure. The pet food product may be formulated for fracturability such that the product crumbles, cracks, or shatters. Fracturability may encompass crumbliness, crispness, crunchiness, and brittleness.

[0223] 6.5.3.3. Dry Pet Food and Feed

[0224] In some embodiments, the food product is a dry pet food or feed product for a companion animal, or dry feed for livestock, zoo animal or a pet.

[0225] The dry pet food or feed product can be made completely of the recombinant animal protein. In some other embodiments, the dry pet food can comprise about 1%, 2%, 3%, 4%, 5%, 6%, 7%, 8%, 9%, 10%, 15%, 20%, 25%, 30%, 35%, 40%, 45%, 50%, 55%, 60%, 65%, 70%, 75%, 80%, 85%, or 90% of the recombinant animal protein.

[0226] A dry pet food or feed product can be prepared by adding one or more dry ingredients. Other ingredients that can be added to a dry food product include but are not limited to the ingredients provided in Section 6.5.2.

[0227] The dry pet food or feed product can be freeze-dried, dehydrated, or air-dried. In some embodiments, the recombinant animal protein can be a coating on another dry food product. In some embodiments, the dry food product is a kibble.

[0228] The dry pet food or feed can have the nutrient profile required for a dog or cat as provided by the AAFCO guidelines. In some embodiments, the dry feed has the nutrient profile as established by NRC for various farm animals.

[0229] Kibbles are generally formed using an extrusion process in which the mixture of dry and wet ingredients is mechanically worked at high temperature and pressure and pushed through small openings and cut off into kibble by a rotating knife. Kibble also can be made using a baking process when the mix is placed into a mold before dry-heat treatment.

[0230] In some embodiments, the recombinant animal protein composition is coated onto the dry kibble, incorporated into the kibble, or both. Other processes such as spraying, soaking, or brushing may be used to either coat the composition on the exterior or inject the recombinant animal protein composition into an existing dry kibble.

[0231] 6.5.3.4. Wet Pet Food and Feed

[0232] The disclosure also provides wet pet food products for a companion animal, or wet feed for livestock or a zoo animal. A wet pet food or feed can be prepared by adding one or more wet ingredients such as water containing host cells comprising recombinant animal protein, water, oils, fats, or vegetables or a combination thereof. Other non-limiting ingredients that can be added to a dry food product are provided in Section 6.5.2. In some embodiments, the wet food product is raw.

[0233] The wet pet food or feed can be made completely of the recombinant animal protein. In some other embodiments, the wet pet food or feed can comprise about 1%, 2%, 3%, 4%, 5%, 6%, 7%, 8%, 9%, 10%, 15%, 20%, 25%, 30%, 35%, 40%, 45%, 50%, 55%, 60%, 65%, 70%, 75%, 80%, 85%, or 90% of the recombinant animal protein.

[0234] The wet pet food or feed can have the nutrient profile required for a dog or cat as provided by the AAFCO guidelines. In some embodiments, the wet feed has the nutrient profile as established by NRC for various farm animals.

[0235] The wet kibble can be a dried kibble that is coated with one or more wet topical coatings supplied as intermediate food product of the disclosure. In some embodiments, wet kibble can be made by mixing the kibble into a gravy-like liquid supplied as an intermediate food product of the disclosure.

[0236] 6.5.3.5. Pet Treats

[0237] The disclosure also provides treats for a companion animal, livestock, or a zoo animal. The treat can be a dry treat, an edible toy, or a chewable toy. The treat can be made completely of the recombinant animal protein. In some other embodiments, the treat can comprise about 1%, 2%, 3%, 4%, 5%, 6%, 7%, 8%, 9%, 10%, 15%, 20%, 25%, 30%, 35%, 40%, 45%, 50%, 55%, 60%, 65%, 70%, 75%, 80%, 85%, or 90% of the recombinant animal protein.

[0238] Treats of the present invention can be prepared by an extrusion or baking process similar to those used for dry food. Treats of the disclosure can be prepared by a molding process. Treats can also be in the form of a chew toy. Chewable toys can include but are not limited to, artificial bones and food compositions shaped to look like natural foods that are appealing to the animal.

[0239] Often, a pet treat will have nutritional value. Nutritional treats may contain one or more nutrients required for a primary food product. Non-nutritional treats can have minimal nutrition of a primary food product. Treat may also be mixed with other ingredients. Other non-limiting ingredients that can be added to a pet treat include provided in Section 6.5.2.

[0240] In some embodiments, the treat further comprises a compound that improves health or wellness. In some embodiments, the treat furthers comprise a compound that improves joint function, skin health, coat or hair, brain development, or improves stool quality and/or stool frequency.

[0241] In some embodiments, the recombinant animal protein composition is coated onto the treat, incorporated into the treat, or both. Other processes such as spraying, soaking, or brushing may be used to either coat the recombinant animal protein as an intermediate food product composition on the exterior of the treat or inject it into an existing treat form.

[0242] 6.5.3.6. Packaging

[0243] The food compositions can be packaged in cans, trays, tubs, pouches, bags, or any other suitable container.

### 6.6. Supplements

[0244] The disclosure provides supplements for a human or animal. A dietary supplement is a product intended to supplement the diet. The recombinant animal protein can be harvested and provided to the supplement composition as a whole-cell food composition, a protein concentrate food composition, or as a protein isolate food composition.

[0245] In some embodiment the supplement is made solely from at least one animal protein provided by the disclosure. In other embodiments, the animal protein is combined with other ingredients or nutrients. Other ingredients include but are not limited to those in Section 6.5.2.

[0246] In some embodiments, a supplement can be taken by mouth. Where a supplement is formulated to be taken by mouth, it can be in the form of a pill, a capsule, a tablet, a liquid, soup, broth, or a dissolvable powder. In some embodiment, the supplement can a dry protein mixture of one or more recombinant animal proteins.

[0247] In other embodiments, a supplement can be incorporated into a commercially available food product. In some embodiments, the recombinant animal proteins is incorporated into a commercially available food product at a percentage (based on dry mass) of 0.1-95%, typically between 10% and 90%, more typically between 5% and 50%, including ranges of 5%-10%, 10-20%, 20-30%, 30-40%, 40-50%, but also including 60-70%, 70-80% and 80%-90% and combinations of these ranges (e.g., 30%-70%).

[0248] In some embodiments, the recombinant animal protein can be incorporated into commercially available food product to increase the percentage of an essential amino acid in the product. The percentage of one or more essential amino acids can be increased in a commercially available food product by about 0.1%, 0.2%, 0.3%, 0.4%, 0.5%, 0.6%. 0.7%, 0.8%, 0.9%, 1%, 2%, 3%, 4%, 5%, 6%, 7%, 8%, 9%, 10%, 20%, 30%, 40%, 50%, 60%, 70%, 80%, or 90% (based on dry mass).

### 6.7. Pharmaceutical Compositions

[0249] The disclosure also provides various pharmaceutical compositions comprising a recombinant animal protein of the disclosure that improves the health or wellness of a human or an animal.

[0250] These compositions can comprise, in addition to the recombinant animal protein, a pharmaceutically acceptable excipient, carrier, buffer, stabilizer or other materials well known to those skilled in the art. Such materials should be non-toxic and should not interfere with the efficacy of the active ingredient.

[0251] The precise nature of the carrier or other material can depend on the route of administration, e.g., oral, intravenous, cutaneous or subcutaneous, nasal, intramuscular, or intraperitoneal routes

[0252] 6.7.1. Improves Health or Wellness

[0253] A pharmaceutical composition can be made by combining a recombinant animal protein provided herein with a compound known or capable of improving the health or the wellness of an animal.

[0254] In some embodiments, the pharmaceutical composition comprises a recombinant animal protein of the disclosure and a compound that improves hip function.

[0255] In some embodiments, the pharmaceutical composition comprises a recombinant animal protein of the disclosure and a compound that improves joint function. In some embodiments, the pharmaceutical composition comprises a recombinant animal protein of the disclosure and a compound that improves skin health. In some embodiments, the pharmaceutical composition a recombinant animal protein of the disclosure and a compound that improves coat or hair. In some embodiments, the pharmaceutical composition comprises a recombinant animal protein of the disclosure and a compound that improves brain development. In some embodiments, the pharmaceutical composition comprises a recombinant animal protein of the disclosure and a compound that improves stool quality and/or stool frequency.

[0256] Wellness of an animal herein encompasses all aspects of the physical, mental, and social well-being of the animal, and is not restricted to the absence of infirmity. Wellness attributes include without limitation states of disease or physiological disorder, states of parasitic infestation, hair and skin condition, sensory acuteness, dispositional and behavioral attributes, and cognitive function. Conditions adverse to wellness encompass not only existing diseases and physiological including, mental, behavioral, and dispositional disorders, but predisposition or vulnerability to such diseases or disorders. Asymptomatic are likewise encompassed.

[0257] 6.7.2. Formulations

[0258] Pharmaceutical compositions for oral administration can be in tablet, capsule, powder or liquid form. A tablet can include a solid carrier such as gelatin or an adjuvant. In some embodiments, the capsule can be made from a vegetarian material such as agar, vegetable cellulose, and the like. Liquid pharmaceutical compositions generally include a liquid carrier such as water, petroleum, animal or vegetable oils, mineral oil or synthetic oil. Physiological saline solution, dextrose or other saccharide solution or glycols such as ethylene glycol, propylene glycol or polyethylene glycol can be included.

[0259] For intravenous, cutaneous or subcutaneous injection or injection at the site of affliction, the active ingredient will be in the form of a parenterally acceptable aqueous solution which is pyrogen-free and has suitable pH, isotonicity and stability. Those of relevant skill in the art are well able to prepare suitable solutions using, for example, isotonic vehicles such as Sodium Chloride Injection, Ringer's Injection, Lactated Ringer's Injection. Preservatives, stabilizers, buffers, antioxidants and/or other additives can be included, as required.

[0260] In some embodiments, the pharmaceutical composition can be in the form of nutritional feed, a food product, or a treat.

[0261] 6.7.3. Methods of Treating

[0262] The disclosure also provides methods of treatment for an animal diagnosed or suffering from a disease or disorder.

[0263] The method can comprise administering a therapeutic-effective amount of the pharmaceutical composition provided herein alone or in combination with another agent or treatment to promote health or wellness.

[0264] In some embodiments, the method includes administering a therapeutically effective amount of the pharmaceutical composition to an animal diagnosed or suffering from a disease or disorder. In yet some other embodiments, the method includes administering a prophylactically effective amount of the pharmaceutical composition to an animal genetically predisposed to a disease or a disorder.

[0265] A genetically predisposed animal can be based on the breed, age, size, or any other physical characteristic.

[0266] 6.7.4. Administration

[0267] For treatment purposes, administration of the pharmaceutical composition is preferably administered to an animal in a “therapeutically effective amount.” In some embodiments, the pharmaceutical composition is preferably administered to an animal in a “prophylactically effective amount” to the animal or individual.

[0268] The actual amount administered, and rate and time-course of administration will depend on the nature and severity of disease or disorder being treated.

[0269] Prescription of treatment, e.g., decisions on dosage, etc., is within the responsibility of general practitioners and other medical doctors, and typically takes account of the disorder to be treated, the condition of the individual patient, the site of delivery, the method of administration and other factors known to practitioners. Examples of the techniques and protocols mentioned above can be found in Remington's Pharmaceutical Sciences, 16th edition, Osol, A. (ed.), 1980.

[0270] 6.7.5. Combination Therapy

[0271] This disclosure also provides combination therapies where the pharmaceutical composition is administered in combination with another therapeutic agent or treatment.

[0272] In some embodiments, the pharmaceutical composition can be administered either simultaneously or sequentially, dependent upon the condition to be treated.

[0273] Non-limiting examples of a therapeutic treatment include physical therapy, surgery, radiation, and dietary restrictions for diseases such as diabetes.

### 6.8. Additional Aspects & Embodiments

[0274] In a first additional aspect, the disclosure provides various food compositions comprising at least one recombinant animal protein.

[0275] Embodiment 1. A food composition, wherein said food composition is formulated for a companion animal, and wherein the food composition comprises at least one recombinant animal protein.

[0276] Embodiment 2. The food composition of embodiment 1, wherein the food composition is substantially free of antibiotics, animal growth hormones, and processed animal meat.

[0277] Embodiment 3. The food composition of any of the above embodiments, wherein the at least one recombinant animal protein is a recombinant animal muscle protein.

[0278] Embodiment 4. The food composition of embodiment 3, wherein the at least one recombinant animal muscle protein is selected from the animal muscle proteins in Table 1.

[0279] Embodiment 5. The food composition of embodiment 4, wherein the food composition comprises at least two recombinant animal muscle proteins.

[0280] Embodiment 6. The food composition of any of the above embodiments, wherein at least one recombinant animal muscle protein comprises a modified amino acid sequence, wherein said modification is relative to the naturally occurring sequence of the animal muscle protein.

[0281] Embodiment 7. The food composition of embodiment 6, wherein said modified recombinant animal muscle protein comprises an amino acid sequence at least 80% identical to a sequence in Table 1.

[0282] Embodiment 8. The food composition of embodiment 6, wherein said modified recombinant animal muscle protein is a truncated form of a sequence in Table 1.

[0283] Embodiment 9. The food composition of embodiment 6, wherein said modified recombinant animal muscle protein comprises a heterologous signal peptide.

[0284] Embodiment 10. The food composition of any of the above claims, wherein the food composition consists of 5% to 95% recombinant animal protein, on a mass percentage basis.

[0285] Embodiment 11. The food composition of embodiment 10, wherein the food composition consists of 5% to 40% recombinant animal protein, on a mass percentage basis.

[0286] Embodiment 12. The food composition of embodiment any of the above claims, wherein the food composition includes 5-50% protein, 0.01-1.5% sodium, 0.01-1.5% potassium, 0-50% fat, 0-75% carbohydrate, 0-40% dietary fiber, and 0-15% of other nutrients.

[0287] Embodiment 13. The food composition of embodiment 10, wherein the food composition consists of 40% to 95% recombinant animal protein.

[0288] Embodiment 14. The food composition of embodiment 10, wherein the food composition consists of 1% to 30% recombinant animal protein.

[0289] Embodiment 15. The food composition of any of the above embodiments, wherein the food composition is formulated for a dog or a cat.

[0290] Embodiment 16. The food composition of any of the above embodiments, wherein the food composition is customized for a particular companion animal or a selected cohort of companion animals with particular dietary needs.

[0291] In a second additional aspect, the disclosure provides methods for preparing the food compositions described herein.

[0292] Embodiment 17. A method for preparing any of the food compositions described above, wherein the method comprises recombinantly expressing at least one recombinant animal protein in a eukaryotic host organism.

[0293] Embodiment 18. The method of embodiment 17, wherein the eukaryotic host organism is a yeast cell.

[0294] Embodiment 19. The method of embodiment 17 or 18, wherein the recombinantly expressed animal protein is secreted by the eukaryotic host organism.

[0295] Embodiment 20. The method of any one of embodiments 17-19, wherein the recombinantly expressed animal protein is isolated from the host organism and the growth medium before mixing with other components in the food composition.

[0296] Embodiment 21. The method of embodiment 20, further comprising mixing the at least one recombinantly expressed animal protein with one or more food components selected from the group consisting of sodium, potassium, fat, carbohydrate, and dietary fiber, and then forming the mixture into a food composition suitable for consumption by an animal.

[0297] Embodiment 22. The method of embodiment 21, wherein at least two animal proteins are recombinantly expressed in a eukaryotic host and isolated prior to mixing with the one or more food components.

[0298] Embodiment 23. The method of embodiment 17 or 18 wherein the recombinantly expressed protein is not isolated from the host organism prior to mixing with other components in the food composition.

[0299] In a third additional aspect, the disclosure provides additional methods for preparing the food compositions described herein.

[0300] Embodiment 24. A method for preparing any of the food compositions described above, wherein the method comprises mixing at least one recombinantly expressed animal muscle protein with one or more compositions selected from the group consisting of sodium, potassium, fat, carbohydrate, and dietary fiber, and then forming the mixture into a food composition suitable for consumption by an animal.

[0301] In a fourth additional aspect, the disclosure provides additional formulations of food compositions comprising at least one recombinant animal protein.

[0302] Embodiment 25. A food composition, wherein said food composition is formulated for a human, and wherein the food composition comprises at least one recombinant animal muscle protein.

### 6.9. Examples

[0303] Below are examples of specific embodiments for carrying out the present invention. The examples are offered for illustrative purposes only and are not intended to limit the scope of the present invention in any way. Efforts have been made to ensure accuracy with respect to numbers used (e.g., amounts, temperatures, etc.), but some experimental error and deviation should, of course, be allowed for.

[0304] The practice of the present invention will employ, unless otherwise indicated, conventional methods of protein chemistry, biochemistry, recombinant DNA techniques and pharmacology used in the art. Also referred to below are the following references: (1) M. R. Green and J. Sambrook, Molecular Cloning: A Laboratory Manual, 4th Edition, Cold Spring Harbor, N.Y.: Cold Spring Harbor Laboratory Press, 2012, pp. 1009-1011; (2) G. C. U. F. T. Tool, GenScript, [Online]. Available: https://www.genscript.com/tools/codon-frequency-table. [Accessed 18 12 2018]; (3) S. Wu and L. J. Geoffrey, “High efficiency transformation by electroporation of Pichia pastoris pretreated with lithium acetate and dithiothreitol,” Drug Discovery and genomic technologies, vol. 36, no. 1, pp. 152-154, 2004; (4) S. Kawai, W. Hashimoto and K. Murata, “Transformation of Saccharomyces cerevisiae and other fungi,” Bioengineered Bugs, vol. 1, no. 6, pp. 395-403, 2010; (5) P. Manivasakam and R. H. Schiestl, “High efficiency transformation of Saccharomyces cerevisiae by electroporation,” Nucleic Acids Research, vol. 21, no. 18, pp. 4414-4415, 1993.

### 6.9.1. Example 1: Expression of Recombinant Actin Protein in a Eukaryotic Host Cell

[0305] Actin is the major component of the cytoskeleton. It exists in two different forms, a monomeric form (G-actin) and a filamentous form (F-actin). G-actin polymerizes to form F-actin, and it is primarily these filaments that participate in processes such as cell motility, transport, and cytokinesis [20]. The actin-binding domain is highly conserved amongst species. Actin-binding proteins share a common binding area on the actin surface, consistent of the cleft between actin subdomains 1 and 3 [21]. There is also a nucleotide-binding site, which is a cleft between subdomains 2 and 4. The binding of adenosine 5′-triphosphate or ATP and subsequent hydrolysis into adenosine 5′-diphosphate or ADP is known to be a critical element in controlling the association of actin with itself and with other proteins. When ATP is bound to actin it polymerizes faster and dissociates slower than ADP-actin [22].

[0306] Single and double mutants of the ATP-binding site of actin will ablate its toxicity in eukaryotic expression hosts and thus increase expression levels. The residues targeted by mutagenesis are P-72, E-74, 1-77, and T-79 (numbering for pig (UniProtKB/Swiss-Prot: P68137), chicken (UniProtKB/Swiss-Prot:P68139), and cow (UniProtKB/Swiss-Prot:P68138)). Recombinant actin protein mutated at these sites will be over-expressed in a eukaryotic host organism, isolated, and incorporated into a companion animal food product.

[0307] In one embodiment, then, the invention provides a food composition comprising a recombinant actin protein, wherein said recombinant actin protein comprises one or more mutations from the group consisting of P-72, E-74, 1-77 and T-79. In certain related embodiments, the recombinant actin protein is a fragment of actin protein comprising the aforementioned residues.

### 6.9.2. Example 2: Identification of Recombinant Actin Sequences for Over-Expression in Eukaryotes

[0308] Actin is highly conserved between widely divergent eukaryotic species. For instance, there is 87% sequence identity (325 of 374 amino acids) between yeast and human actin. Comparing chicken, cow, pig, human, and Saccharomyces cerevisiae, there are 319 conserved residues. A library of point mutations is made at each of these conserved positions and those mutations that are permissive of high levels of expression of mutant actin are identified.

### 6.9.3. Example 3: Engineered Animal Proteins for Over-Expression in Eukaryotic Cells

[0309] Error-prone PCR with/without shuffling will be used across the DNA coding sequence (cDNA) to create mutated DNAs encoding animal protein sequences. Eukaryotic hosts recombinantly expressing the mutant sequences will be screened for high growth and high expression of the target protein.

[0310] The genes and the proteins encoded by the genes may also be truncated in order to yield a high expression and fast cell growth. Modifications of the gene sequence (e.g., the addition or removal of certain amino acids) will, in some cases, increase cell viability and increase the rate of cell division. Proteins that are too large to overexpress efficiently will be truncated in order to increase the expression level.

### 6.9.4. Example 4: Insertion of a Chicken Coronin Gene into an Saccharomyces cerevisiae Strain and Extracellular Expression of the Corresponding Protein

[0311] The expression vector pD1214-FAKS (ATUM) contains the 2-micron origin of replication, which encodes proteins that allow yeast cells to maintain 20-50 copies of recombinant plasmid per cell. Because 2-micron plasmids are maintained at such high copy numbers, they provide a convenient way to monitor the effects of overproduction of a particular gene product. The plasmid also contains a bacterial origin of replication (Ori_pUC) which allows production of greater than 500 copies of plasmid per cell in Escherichia coli. It is replicated in Escherichia coli TOP10 cells grown in Low Salt Luria-Bertani medium (5 g/L NaCl) including 100 μg/mL carbenicillin as selective pressure at 37° C. The vector also contains the alpha factor, which is a secretion signal derived from the yeast mating pheromone alpha-factor in Saccharomyces cerevisiae and facilitates secretion of heterologous proteins in yeast. The plasmid is purified from E. coli by methods well known in the art, using for instance a commercially available plasmid prep kit, such as the QIAGEN Plasmid Mini Kit. The vector is linearized using a SapI restriction enzyme followed by enzymatic dephosphorylation using established molecular cloning methods. The gene encoding the protein product of interest, chicken coronin, can also be ordered in the selected vector from contract cloning vendors such as ATUM (Newark, Calif.). This plasmid contains features such as the strong constitutive promoter TEF1, encoding translation-elongation factor 1 alpha and the gene coding for ampicillin resistance (beta lactamase). The vector also contains an auxotrophic marker URA3, which encodes orotidine-5′ phosphate decarboxylase, an enzyme that is required for the biosynthesis of uracil.

[0312] Linearized plasmid is separated using agarose gel electrophoresis. An agarose gel section containing linearized plasmid is collected and the linearized plasmid is purified from the agarose using a commercially available DNA purification kit, e.g. the QIAquick Gel Extraction Kit (Qiagen).

[0313] The gene sequence for chicken coronin can be obtained from UniProt.org under accession number F1NXA5. The double-stranded DNA is constructed through chemical gene synthesis from either ATUM (Newark, Calif.), Genscript (Piscataway, N.J.), or IDT (Coralville, Iowa). It is supplied in a vector of choice. The DNA sequence can also be obtained via amplification of cDNA generated directly from a biological sample, such as a tissue or a blood sample. The gene sequence is modified to aid in cloning, gene expression, or enhance production. It is “codon optimized”, i.e., triplet DNA sequences that are not commonly used in the expression host are changed to those that are commonly used. The specific species in this case is Saccharomyces cerevisiae and the codon usage table is obtained from GenScript.

[0314] The codon optimized coronin gene (CORO6), containing exons, but no introns, is ligated to the linearized and purified vector via enzymatic ligation to generate a vector capable of being inserted into a host organism. Electroporation and other methods of transformation are well known in the art. The vector containing the ORF is transformed into the host strain (S. cerevisiae, in this example) via electroporation using of 1.5 kV, 25 μF, and 200Ω. Chemical transformation or another method can also be used. Transformed cells are plated onto minimal media lacking uracil and incubate at 30° C. until heterotrophic colonies arise in 2-3 days. Colonies are picked and transferred into cultures of minimal media or YPD and grown for 24-90 hours at 28-30° C. The successful clone is confirmed by sequencing for insert identity and copy number using established methods such as PCR, q-PCR, or Southern Blot.

[0315] The supernatant is analyzed for secreted protein expression by SDS-PAGE. Isolated clones expressing the secreted protein will be cultured, and the recombinantly expressed protein is isolated from the engineered yeast cells or, if secreted, is isolated from the medium. The secreted, recombinantly expressed protein is then formulated into a food composition for animals, preferably companion animals. In one embodiment, then, the disclosure provides a food composition comprising a recombinantly expressed chicken coronin protein. In certain embodiments, the recombinantly expressed chicken coronin protein is harvested from yeast cultures, wherein the yeast has been engineered to express the protein.

### 6.9.5. Example 5: Insertion of a Pig Myozenin Gene into a Komagataella phaffii Strain and Intracellular Expression of the Corresponding Protein

[0316] The expression vector pD902 (ATUM, Newark, Calif.) contains a bacterial origin of replication (OripUC) which allows production of greater than 500 copies of plasmid per cell in Escherichia coli. It is replicated in Escherichia coli TOP10 cells grown in Low Salt Luria-Bertani medium (5 g/L NaCl) including 25 μg/mL zeocin as selective pressure at 37° C. The plasmid is purified by a method well known in the art, using for instance a commercially available plasmid prep kit, such as the QIAGEN Plasmid Mini Kit. The vector is linearized using a SapI restriction enzyme and performing dephosphorylation using established molecular cloning methods [1]. The gene can also be ordered in the selected vector. This plasmid contains features such as the AOX1 promoter used for recombinant gene expression and the resistance marker for zeocin. Linearized plasmid is separated using agarose gel electrophoresis. An agarose gel section containing linearized plasmid is collected and the linearized plasmid is purified from the agarose using a commercially available DNA purification kit, e.g. the QIAquick Gel Extraction Kit (Qiagen).

[0317] The gene sequence for pig myozenin can be obtained from UniProt.org under accession number Q4PS85. The double-stranded DNA is constructed through chemical gene synthesis from either ATUM (Newark, Calif.), Genscript (Piscataway, N.J.), or IDT (Coralville, Iowa). It is supplied in a vector of choice. The DNA sequence can also be obtained via amplification of cDNA generated directly from a biological sample, such as a tissue or a blood sample. The gene sequence is modified to aid in cloning, gene expression, or enhance production. It is “codon optimized”, i.e. triplet DNA sequences that are not commonly used in the expression host are changed to those that are commonly used. The specific species in this case is Komagataella phaffii (previously Pichia pastoris) and the codon usage table is obtained from GenScript [2]. The strain PPS-9016 is protease-deficient (ATUM, Newark, Calif.). Other variants of Komagataella phaffii can also be used.

[0318] The codon optimized myozenin gene (MYOZ1), containing exons, but no introns, is ligated to the linearized and purified vector via enzymatic ligation to generate a vector capable of being inserted into a host organism. The method used is known in the art and the protocol can be obtained from a molecular cloning manual [1]. The vector containing the gene, also called ORF open reading frame) is linearized using the PmeI restriction enzyme. Twenty micrograms of DNA are digested using the corresponding buffer of the restriction enzyme (from e.g. NEB) in a volume of 200 μL. Five μL of digested DNA is run on a 1% agarose gel and compared with an undigested control. The digested product is ethanol precipitated using 1/10 volume of 3M sodium acetate and 2.5 volumes of 100% ethanol. It is centrifuged to pellet the DNA and pellet is washed with 70% ethanol, air dried, and suspended in 20 μL of deionized sterile water or 10 mM Tris-Cl, pH 8.0. The linearized vector containing the ORF is transformed into the host strain.

[0319] Transformation is performed via electroporation using instrument settings of 1.5 kV, 25 μF, and 186-200Ω. Electrocompetent cells are obtained via methods known in the art [3]. Chemical transformation or another method can also be used. The vector containing the ORF is integrated into the chromosome of the host organism. The vector does not contain a yeast origin of replication and selected transformants, grown at 30° C. on YPD agar plates containing 100-1000 μg/mL zeocin and 1 M sorbitol, will contain the zeocin resistance gene integrated into the genome. Multiple insertions of the gene may be used. The successful clone is confirmed by sequencing for insert identity and copy number using established methods such as PCR, q-PCR, or Southern Blot [1].

[0320] Colonies are picked into BMGY broth with 250 μg/ml zeocin and are grown at 30° C. shaking at 250 rpm. After 2 days of incubation, 300 μL of BMMY broth is added to each well, and incubation is continued for an additional 2-4 days. The cells are pelleted by centrifugation and the cell pellets are lysed by methods known in the art, e.g. by sonication [1] and analyzed for protein expression by SDS-PAGE.

### 6.9.6. Example 6: Insertion of a Pig Myozenin Gene into a Komagataella phaffii Strain and Extracellular Expression of the Corresponding Protein

[0321] The expression vector pD912 (ATUM, Newark, Calif.) contains a bacterial origin of replication (Ori_pUC) which allows production of greater than 500 copies of plasmid per cell in Escherichia coli. It is replicated in Escherichia coli TOP10 cells grow in in Low Salt Luria-Bertani medium (5 g/L NaCl) including 25 μg/mL zeocin as selective pressure at 37° C. The vector also contains the alpha factor, which is a secretion signal derived from the yeast mating pheromone alpha-factor in Saccharomyces cerevisiae and facilitates secretion of heterologous proteins in yeast. The plasmid is purified by a well-known method, using for instance a commercially available plasmid prep kit, such as the QIAGEN Plasmid Mini Kit. The vector is linearized using a SapI restriction enzyme and performing dephosphorylation using established molecular cloning methods [1]. The gene can also be ordered in the selected vector. This plasmid contains features such as the AOX1 promoter used for recombinant gene expression and the resistance marker for zeocin. Linearized plasmid is separated using agarose gel electrophoresis. An agarose gel section containing linearized plasmid is collected and the linearized plasmid is purified from the agarose using a commercially available DNA purification kit, e.g. the QIAquick Gel Extraction Kit (Qiagen).

[0322] The gene sequence for pig myozenin can be obtained from UniProt.org under accession number Q4PS85. The double-stranded DNA is constructed through chemical gene synthesis from either ATUM (Newark, Calif.), Genscript (Piscataway, N.J.), or IDT (Coralville, Iowa). It is supplied in a vector of choice. The DNA sequence can also be obtained via amplification of cDNA generated directly from a biological sample, such as a tissue or a blood sample. The gene sequence is modified to aid in cloning, gene expression, or enhance production. It is “codon optimized”, i.e. triplet DNA sequences that are not commonly used in the expression host are changed to those that are commonly used. The specific species in this case is Komagataella phaffii (previously Pichia pastoris) and the codon usage table is obtained from GenScript [2]. The strain PPS-9016 is protease-deficient (ATUM, Newark, Calif.). Other variants of Komagataella phaffii can also be used.

[0323] The codon optimized myozenin gene (MYOZ1), containing exons, but no introns, is ligated to the linearized and purified vector via enzymatic ligation to generate a vector capable of being inserted into a host organism. The method used is known in the art and the protocol can be obtained from a molecular cloning manual [1]. The vector containing the gene, also called ORF open reading frame) is linearized using the PmeI restriction enzyme. Twenty micrograms of DNA are digested using the corresponding buffer of the restriction enzyme (from e.g. NEB) in a volume of 200 μL. Five μL of digested DNA is run on a 1% agarose gel and compared with an undigested control. The digested product is ethanol precipitated using 1/10 volume of 3M sodium acetate and 2.5 volumes of 100% ethanol. It is centrifuged to pellet the DNA and pellet is washed with 70% ethanol, air dried, and suspended in 20 μL of deionized sterile water or 10 mM Tris-Cl, pH 8.0. The linearized vector containing the ORF is transformed into the host strain via electroporation using instrument settings of 1.5 kV, 25 μF, and 186-200Ω. Electrocompetent cells are obtained via methods known in the art [3]. Chemical transformation or another method can also be used. The vector containing the ORF is integrated into the chromosome of the host organism. The vector does not contain a yeast origin of replication and selected transformants, grown at 30° C. on YPD agar plates containing 100-1000 μg/mL zeocin and 1 M sorbitol, will contain the zeocin resistance gene integrated into the genome. Multiple insertions of the gene may be used. The successful clone is confirmed by sequencing for insert identity and copy number using established methods such as PCR, q-PCR, or Southern Blot [1].

[0324] Colonies are picked into BMGY broth with 250 μg/ml zeocin and are grown at 30° C. shaking at 250 rpm. After 2 days of incubation, 300 μL of BMMY broth is added to each well, and incubation is continued for an additional 2-4 days. The supernatant is analyzed for secreted protein expression by SDS-PAGE.

### 6.9.7. Example 7: Insertion of a Chicken Coronin Gene into an Saccharomyces cerevisiae Strain and Intracellular Expression of the Corresponding Protein

[0325] The expression vector pD91248 (ATUM, Newark, Calif.) contains a bacterial origin of replication (OripUC) which allows production of greater than 500 copies of plasmid per cell in Escherichia coli. It is replicated in Escherichia coli TOP10 cells grown in Low Salt Luria-Bertani medium (5 g/L NaCl) including 100 μg/mL carbenicillin as selective pressure at 37° C. The plasmid is purified by a method well known in the art, using for instance a commercially available plasmid prep kit, such as the QIAGEN Plasmid Mini Kit. The vector is linearized using a SapI restriction enzyme and performing dephosphorylation using established molecular cloning methods [1]. The gene can also be ordered in the selected vector. This plasmid contains features such as the bidirectional galactose inducible promoter cassette pGAL1/pGAL10 and the gene coding for ampicillin resistance (beta lactamase). The vector also contains an auxotrophic marker URA3, which encodes orotidine-5′ phosphate decarboxylase, an enzyme that is required for the biosynthesis of uracil.

[0326] Linearized plasmid is separated using agarose gel electrophoresis. An agarose gel section containing linearized plasmid is collected and the linearized plasmid is purified from the agarose using a commercially available DNA purification kit, e.g. the QIAquick Gel Extraction Kit (Qiagen).

[0327] The gene sequence for chicken coronin can be obtained from UniProt.org under accession number F1NXA5. The double-stranded DNA is constructed through chemical gene synthesis from either ATUM (Newark, Calif.), Genscript (Piscataway, N.J.), or IDT (Coralville, Iowa). It is supplied in a vector of choice. The DNA sequence can also be obtained via amplification of cDNA generated directly from a biological sample, such as a tissue or a blood sample. The gene sequence is modified to aid in cloning, gene expression, or enhance production. It is “codon optimized”, i.e. triplet DNA sequences that are not commonly used in the expression host are changed to those that are commonly used. The specific species in this case is Saccharomyces cerevisiae and the codon usage table is obtained from GenScript [2].

[0328] The codon optimized coronin gene (CORO6), containing exons, but no introns, is ligated to the linearized and purified vector via enzymatic ligation to generate a vector capable of being inserted into a host organism. The method used is known in the art and the protocol can be obtained from a molecular cloning manual [1]. The vector containing the gene, also called ORF (open reading frame) is linearized using the NcoI restriction enzyme. Twenty micrograms of DNA are digested using the corresponding buffer of the restriction enzyme (from e.g. NEB) in a volume of 200 μL. Five μL of digested DNA is run on a 1% agarose gel and compared with an undigested control. The digested product is ethanol precipitated using 1/10 volume of 3M sodium acetate and 2.5 volumes of 100% ethanol. It is centrifuged to pellet the DNA and pellet is washed with 70% ethanol, air dried, and suspended in 20 μL of deionized sterile water or 10 mM Tris-Cl, pH 8.0. The linearized vector containing the ORF is transformed into the host strain.

[0329] Transformation is performed via electroporation using instrument settings of 1.5 kV, 25 μF, and 186-200Ω. Electrocompetent cells are obtained via methods known in the art [3]. Chemical transformation or another method can also be used. The vector containing the ORF is integrated into the chromosome of the host organism. The vector does not contain a yeast origin of replication and selected transformants, grown at 30° C. on CM agar minus uracil will contain the URA3 gene integrated into the genome. Incubate at 30° C. until colonies arise in 2-3 days. Multiple insertions of the gene may be used. The successful clone is confirmed by sequencing for insert identity and copy number using established methods such as PCR, q-PCR, or Southern Blot [1].

[0330] Colonies are picked into YPD broth and are grown at 28-30° C. shaking at 250 rpm for 24-90 hours. The cells are pelleted by centrifugation and the cell pellets are lysed by methods known in the art, e.g. by sonication [1] and analyzed for protein expression by SDS-PAGE.

### 6.9.8. Example 8: Production of Recombinant Cofilin-2 Protein from Chicken in an Saccharomyces cerevisiae Host Cell

[0331] This study was conducted to determine if an Saccharomyces cerevisiae host cell could produce a cofilin-2 protein from chicken.

[0332] Cofilin-2 reversibly controls actin polymerization and depolymerization in a pH-sensitive manner. The particular protein used here is muscle-specific.

### Methods

[0333] Identification of the Cofilin-2 Gene Sequences from a Chicken Genome

[0334] The sequence for the cofilin-2 gene in the chicken genome was obtained by searching https://www.ncbi.nlm.nih.gov. The NCBI reference number was NP_001004406.1. The amino acid sequence for cofilin-2 was:

[SEQ ID NO: 1]
MASGVTVNDEVIKVFNDMKVRKSSTPEEIKKRKKAVLFCLSDDKKQIIV
EEATRILVGDIGDTVEDPYTAFVKLLPLNDCRYALYDATYETKESKKED
LVFIFWAPESAPLKSKMIYASSKDAIKKKFTGIKHEWQVNGLDDIKDRS
TLGEKLGGNVVVSLEGKPL

### Codon Optimization of Cofilin-2

[0335] The amino acid sequence was codon optimized for expression in S. cerevisiae using ATUM's GeneGPS™ algorithm.

[0336] The codon optimized sequence for the chicken cofilin-2 gene was:

[SEQ ID NO: 2]
ATGGCATCAGGCGTCACAGTGAACGATGAAGTTATCAAGGTTTTCAACG
ATATGAAAGTTCGTAAGTCTAGCACCCCAGAGGAAATCAAAAAGAGAAA
AAAAGCTGTCTTGTTTTGTTTATCCGATGACAAAAAGCAGATTATTGTA
GAGGAAGCTACTAGAATCCTTGTGGGTGATATAGGTGACACTGTAGAGG
ATCCTTACACTGCCTTCGTCAAGTTGTTACCATTAAATGATTGCAGATA
TGCTCTCTACGACGCTACATACGAAACCAAGGAATCTAAAAAAGAGGAC
TTGGTTTTCATCTTTTGGGCCCCTGAATCCGCGCCACTGAAGAGTAAGA
TGATATACGCATCTTCAAAGGATGCAATTAAAAAAAAGTTCACAGGTAT
TAAGCATGAATGGCAAGTTAACGGGCTTGATGATATTAAAGATAGATCT
ACATTGGGTGAAAAGCTAGGCGGAAATGTTGTGGTTTCATTGGAAGGAA
AGCCACTATAA

### Cloning of Cofilin-2 Gene

[0337] The gene was synthesized by ATUM and cloned into the pD1248 (ATUM, Newark, Calif.) expression vector, which is a yeast integrating plasmid. The resulting plasmid was designated as (“pBOND4”). The gene was amplified using the cloning primers oBOND11 oBOND12 (see Table 11).

[0338] The resulting PCR fragment was digested with restriction enzymes XhoI and EcoRI, gel purified, and then ligated with T4 DNA ligase into the pRS424 (ATCC® 77105™) expression vector, which was linearized with the same restriction enzymes and dephosphorylated by Quick CIP (New England Biolabs). This generated the expression vector (“pBOND21”) which has a 2-micron origin of replication and can be selected by complementation of tryptophan auxotrophy.

[0339] The pBOND21 expression vector was introduced into an S. cerevisiae host cell ATCC®208288™ designated as (“sBOND1”) by transformation using Zymo Research™ Frozen-EZ Yeast Transformation II kit following the manufacturer's instructions. The empty vector (“pBOND8”) was transformed into the sBOND1 strain and ran in parallel as a control.

### Cell Culture

[0340] Cells were grown in flasks on selective media (lacking tryptophan) containing 2% (w/v) raffinose until they reached an OD600 of 1 (i.e., exponential phase). During the exponential growth phase, galactose was added to the flask at a final concentration of 2% (w/v) to induce the expression of the cofilin-2 protein. After induction, the cultures were grown for another 24 hours with vigorous shaking.

### Protein Analysis

[0341] Cells were collected by centrifugation. Cell pellets were weighed, and protein extracts were prepared using the Thermo Scientific™ YPER Yeast Protein Extraction Reagent according to manufacturer's instructions. The protein extracts were quantitated using the Pierce™ BCA Protein Assay Kit according to manufacturer's guidelines. Equal amounts of total protein were loaded for each lane and then analyzed by SDS-PAGE. Proteins were visualized by Coomassie staining.

### Results

[0342] FIG. 1 is a photograph of the SDS-PAGE gel. The size of the cofilin-2 protein is 19 kDa. Lane 1 shows the molecular weight marker with the kDa sizes indicated. Lane 2 shows the host cell (sBOND1) with the empty vector (pBOND8), a control. Lane 3 shows a first clone (clone 1) of the host cell (sBOND1) with the pBOND21 vector. Lane 4 shows a second clone (clone 2) of the host cell (sBOND1) with pBOND21 vector.

[0343] We observed a 19 kDa protein strongly expressed in lane 3 and lane 4, indicating that two different clones of the S. cerevisiae host cell comprising the pBOND21 vector express the cofilin-2 protein. In contrast, no 19 kDa protein was observed in the control empty vector strain (lane 2). These results demonstrate that a chicken cofilin-2 gene can be robustly produced in an S. cerevisiae host cell.

### 6.9.9. Example 9: The Expression of a Recombinant Chicken Cofilin-2 Protein Did not Hinder the Growth of Saccharomyces cerevisiae

[0344] Overexpression of actin and actin binding-proteins (also referred to as the “actin cytoskeleton machinery”) has deleterious effects in eukaryotic cells, such as yeast. These deleterious effects can include lethality, slow growth rates (e.g., delayed progression through the cell cycle), and abnormal morphology (e.g., filamentous growth). See, Yoshikawa et al. (2011) Yeast 28: 349-361; Stevenson et al. (2001) PNAS 98(7): 3946-3951. Cofilins are actin binding proteins that drive depolymerization of actin filaments. See Winder and Ayscough, J. Cell Science (2005) 118 (4): 651-654.

[0345] This study was conducted to determine if overexpressing a chicken cofilin-2 gene in an S. cerevisiae host cell hinders the growth of the host cell.

### Methods

### Cell Culture

[0346] The strains and cell culture were as described in Example 8.

### Growth Study

[0347] The two flasks, for each strain, were grown in either raffinose only or raffinose plus galactose to induce induction of protein expression, yielding eight separate flasks (four of each strain). Samples were taken every hour for the first 10 hours and then at various subsequent time points. The OD600 was measured at each time point. The OD600 values were graphed as averaged values from two flasks.

[0348] The results of the growth curves are shown in FIG. 2. The growth curves were established by plotting the average OD600 measurement over time. The maximum specific growth rate (μmax) was calculated by plotting ln(OD600) versus duration and then performing a linear regression analysis in Excel [version 16.31] from samples taken at the exponential phase. The value of μmax was determined by taking the maximum value of the slope between three time points. FIG. 3 shows the maximum specific growth rates (μmax [h-1]).

### Results

[0349] We observed no significant difference in the final cell densities (e.g., growth curve at saturation) between the recombinant yeast strain expressing cofilin-2 and the empty vector control strain, using a 95% confidence statistical threshold (one-way ANOVA). See FIG. 2. In addition, we observed no significant difference in the maximum specific growth rates between the recombinant yeast strains expressing cofilin-2 and the empty controls, using a 95% confidence statistical threshold (one-way ANOVA). See. FIG. 3. Moreover, there was no significant difference in μmax for the cofilin-2 strain with or without galactose (with/or without induction of protein expression).

[0350] These results demonstrate that an S. cerevisiae host cell expressing cofilin-2 can effectively grow and therefore efficiently produce an animal muscle protein.

### 6.9.10. Example 10: Production of Recombinant Profilin Protein from Chicken in an Saccharomyces cerevisiae Host Cell

[0351] This study was conducted to determine if a chicken profilin gene can be recombinantly produced in an S. cerevisiae host cell.

### Methods

[0352] Identification of Profilin Gene from Chicken

[0353] The sequence of chicken profilin was identified by searching Uniprot.org. The UniProt accession number was Q5ZL50. The amino acid sequence was:

[SEQ ID NO: 3]
MAGWQSYVDNLMCDGCCQEAAIVGYCDAKYVWAATAGGIFQSITPVEID
MIVGKDREGFFTNGLTLGAKKCSVIRDSLYVDGDCTMDIRTKSQGGEPT
YNVAVGRAGRVLVFVMGKEGVHGGGLNKKAYSMAKYLRDSGF

### Codon Optimization of Profilin

[0354] The amino acid sequence was codon optimized for expression in S. cerevisiae using ATUM's GeneGPS™ algorithm. The resulting gene sequence was:

[SEQ ID NO: 4]
ATGGCTGGCTGGCAATCTTATGTGGATAACTTAATGTGTGATGGATGTT
GTCAAGAGGCTGCAATCGTGGGTTACTGCGACGCAAAATACGTTTGGGC
AGCAACAGCTGGGGGCATATTCCAATCAATTACACCAGTTGAAATTGAT
ATGATCGTTGGTAAAGATAGAGAGGGATTTTTCACTAATGGTCTAACTT
TAGGTGCCAAAAAGTGCAGTGTTATCAGAGACTCACTGTACGTAGACGG
GGATTGCACCATGGATATTCGTACAAAGTCTCAGGGTGGAGAACCTACA
TACAACGTCGCGGTCGGCAGAGCCGGGAGAGTTTTGGTTTTCGTAATGG
GCAAGGAAGGTGTCCATGGTGGTGGACTTAACAAAAAGGCCTACTCTAT
GGCTAAGTACTTGAGAGATTCCGGTTTTTAA

### Cloning of Profilin Gene

[0355] The gene was synthesized by ATUM and cloned into the pD1205 (ATUM) expression vector, which is a 2-micron episomal vector that has GAL1-promoter and the TRP1 selection marker gene. The resulting expression vector was designated as (“pBOND3”).

[0356] The vector was transformed into chemically competent E. coli strain 5-alpha (New England Biolabs) by heat-shock transformation following the manufacturer's protocol and selection on Luria Bertani (LB) agar plates containing 25 μg/mL chloramphenicol.

[0357] Colonies were patched onto fresh LB plates with chloramphenicol and incubated at 37° C. Liquid cultures were inoculated and grown with shaking until saturation. The expression vector was purified using Zyppy plasmid miniprep kit (Zymo Research) by following the manufacturer's instructions.

[0358] The gene insert was verified by PCR and restriction digestion and transformed into host cell (“sBOND1”). The pBOND3 expression vector was transformed into the sBOND1 host cell by electroporation in a Bio-Rad Gene Pulser™.

[0359] The cell suspension was spread onto tryptophan dropout selection plates containing 6.8 g/L yeast nitrogen base without amino acids (Sigma Y0626), 1.9 g/L yeast synthetic dropout medium without tryptophan (Sigma Y1876), and 2% glucose (w/v).

### Cell Culture

[0360] Cells were grown in medium containing 6.8 g/L yeast nitrogen base without amino acids (Sigma Y0626), 1.9 g/L yeast dropout supplements without tryptophan (Sigma Y1876) and 20 g/L raffinose. The strain was cultured to an OD600 of 1, at which time profilin expression was induced by adding 20 g/L galactose. After induction, the culture was grown for an additional 18 hours. The final OD600 was around 8.

### Protein Analysis

[0361] Samples were taken at time of induction, after 5 hours, and at the end of the cultivation. Protein cell extracts were made as follows. The cells were lysed by a sodium hydroxide protocol (Kushnirov, 2000, Rapid and reliable protein extraction from yeast. Yeast, 16, 857-860). Cell pellets from 0.5 mL cell suspension were resuspended in 100 μL deionized water and 100 μL 0.2 N NaOH was added to each tube and then incubated at room temperature for 5 min. Subsequently, the cells were spun down for 1 min at 16000 g and resuspended in 40 μL sample buffer containing SDS (Laemmli, 1970, Cleavage of Structural Proteins during the Assembly of the Head of Bacteriophage T4. Nature, 227, 680-685).

[0362] Equal amounts of total protein were loaded to each lane and analyzed by SDS-PAGE. Proteins were visualized by Coomassie staining, see FIG. 4.

### Results

[0363] FIG. 4 shows the results from the SDS-PAGE separation. The size of the profilin protein is 15 kDa. Lane 1 shows the molecular weight marker. Lane 2 shows protein expression before induction. Lane 3 shows protein expression 5 hours after induction by galactose. Lane 4 shows protein expression 18 hours after induction.

[0364] We observed increasing intensity of a 15 kDa protein band in lanes 3-4, where the S. cerevisiae host cell was induced to express the chicken profilin protein at increasing time durations. In contrast, a 15 kDa protein was not detected where there was no induction, lane 2. These results demonstrate that a chicken profilin protein can be produced in an S. cerevisiae host cell.

### 6.9.11. Example 11: The Expression of a Recombinant Chicken Profilin Protein Did not Severely Hinder the Growth of an Saccharomyces cerevisiae Host Cell

[0365] This study was conducted to determine if a recombinant S. cerevisiae host cell overexpressing a chicken profilin gene hinders the growth of the host cell.

### Methods

### Cell Culture

[0366] Cells were grown in flasks, two flasks for each strain, in either raffinose only or raffinose plus galactose, to induce induction of protein expression, yielding eight separate flasks (four for each strain). The medium also contained 6.8 g/L yeast nitrogen base without amino acids (Sigma Y0626) and 1.9 g/L yeast synthetic dropout medium without tryptophan (Sigma Y1876). The cultures were inoculated at an OD600 of about 0.2, and then grown for approximately 30 hours. Samples were taken every hour for the first 10 hours and then at various subsequent time points. The OD600 was measured at each time point. The OD600 values were graphed as averaged values from two flasks.

### Growth Analysis

[0367] Samples were taken every hour for the first 10 hours and then at various subsequent time points. The growth analysis was conducted as described in the Example 9.

[0368] Results

[0369] The results from the growth study are shown in FIG. 6 and FIG. 7. The growth curves are shown in FIG. 6. The maximum specific growth rates are shown in FIG. 7. We observed no significant differences between the final OD600 values or the maximum specific growth rates, between the strains expressing recombinant profilin and the empty control strains, using a 95% confidence statistical threshold (ANOVA). However, the maximum specific growth rate for the profilin strain was significantly higher for the uninduced culture compared to when induced with galactose (P value <0.05). The final OD600 values were also significantly higher for the uninduced culture. Still, the difference in final cell density was only around 20%. Thus, these results demonstrate that the expression of a chicken profilin-2 gene does not severely hinder the growth of a S. cerevisiae host cell.

### 6.9.12. Example 12: Recombinantly Expressed Profilin Protein can Increase the Amount of Essential Amino Acids

[0370] This study was conducted to determine if the recombinantly expressed profilin protein can increase the percentage of essential amino acids in a whole-cell extract.

### Methods

[0371] Identification of Profilin Gene from Chicken

[0372] The identification, cloning, and codon-optimization of the profilin gene were conducted as described in Example 10.

### Cell Culture

[0373] Profilin was expressed in several shake flask cultivations (about 10 L total) grown in 20 g/l raffinose medium (tryptophan dropout medium, as above) and induced by 20 g/l galactose at an OD600 around 1. After induction, the culture was grown for additional 22-24 hours. A control culture containing pBOND8 was prepared in the same host cell and ran in parallel.

### Amino Acid Analysis

[0374] The cells were concentrated by filtration using a 0.45 μm cellulose acetate membrane. The cells were dried at 65° C. for a minimum of 2 hours. The dried cells were submitted to Midwest laboratories for analysis.

### Results

[0375] Table 2 shows the amino acid analysis of S. cerevisiae expressing profilin compared to a control without profilin. Values reported as % (w/w).

TABLE 2
Crude protein and amino acid analysis of S. cerevisiae
expressing profilin compared to a control without profilin

| | | | Relative shift |
|---|---|---|---|
| | | | compared to |
| Analyte | Profilin | Control | control |
| Protein (crude) | 53.4% | 54.8% | |
| Aspartic acid | 5.16% | 4.15% | 24% |
| Threonine * | 1.63% | 1.38% | 18% |
| Serine | 2.55% | 2.07% | 23% |
| Glutamic acid | 5.85% | 5.41% | 8% |
| Proline | 1.87% | 1.55% | 21% |
| Glycine | 2.26% | 1.90% | 19% |
| Alanine | 3.04% | 3.37% | −10% |
| Cystine | 0.57% | 1.00% | −43% |
| Valine * | 3.00% | 2.82% | 6% |
| Methionine * | 0.88% | 0.71% | 24% |
| Isoleucine * | 2.49% | 2.11% | 18% |
| Leucine * | 3.73% | 3.40% | 10% |
| Tyrosine | 1.82% | 1.72% | 6% |
| Phenylalanine * | 2.25% | 1.87% | 20% |
| Lysine * | 3.92% | 3.62% | 8% |
| Histidine * | 1.16% | 1.23% | −6% |
| Arginine * | 2.76% | 2.69% | 3% |
| Tryptophan * | 0.63% | 0.54% | 17% |

* indicates that the amino acid is an essential amino acid for dogs.

[0376] These results show the recombinant host cell expressing profilin had an increase in all but one of the essential amino acids analyzed, as determined by % of dry weight. The only exception was histidine. See, the column labeled “Relative shift compared to control” in Table 2.

[0377] These results demonstrate that a recombinantly expressed profilin protein can increase the amount of essential amino acids in a whole-cell extract.

### 6.9.13. Example 13: Treat Composition Made with Recombinant Animal Protein

[0378] This study was conducted to determine if the recombinant animal protein powder can be used in a recipe with other ingredients to produce a food composition in the form of a dried pet treat.

### Methods

[0379] Identification of Profilin Gene from Chicken

[0380] The identification, cloning, and codon-optimization of the profilin gene were conducted as described in Example 10.

### Cell Culture

[0381] Cells were grown in flasks, in 13 L of 20 g/l raffinose medium, 6.8 g/L yeast nitrogen base without amino acids (Sigma Y0626), and 1.9 g/L yeast synthetic dropout medium without tryptophan (Sigma Y1876). When the culture reached an OD600 of 1 (i.e., exponential phase growth), expression of the profilin protein was induced by adding 20 g/l galactose. After induction, the culture was grown for another 22-24 hours, yielding a culture with an OD600 range of approximately 7-9.

[0382] The resulting cells were concentrated by filtration using a 0.45 μm cellulose acetate membrane. Next, the cells were dried at 70° C. for 1.5 hours. The dry weight yield was approximately 2.5 g/L.

Processing into a Treat

[0383] Whole-cells expressing the chicken profilin protein were pelleted and dried as described above. The dried pellets are shown in FIG. 8. Next, the pellets were ground until they became a fine powder. The profilin protein powder was then mixed with other ingredients, as outlined in Table 3, to make three different formulations. Each formulation contained different amounts of the profilin protein.

TABLE 3
Ingredients used for dog treats with recombinant chicken profilin protein

| | Ingredient (g) | | | Ingredient (wt %) | | |
|---|---|---|---|---|---|---|
| Ingredient | Treat #1 | Treat #2 | Treat #3 | Treat #1 | Treat #2 | Treat #3 |
| Red lentil flour | 5.5 | 5.5 | 5.5 | 9.2% | 8.4% | 9.9% |
| Sweet potato puree | 12.8 | 12.8 | 12.8 | 21.3% | 19.4% | 23.0% |
| Chickpea flour | 7.7 | 7.7 | 7.7 | 12.8% | 11.7% | 13.8% |
| Coconut oil | 5.1 | 5.1 | 5.1 | 8.5% | 7.8% | 9.2% |
| Oat flour | 5.1 | 5.1 | 5.1 | 8.5% | 7.8% | 9.2% |
| Quick oats | 2.6 | 2.6 | 2.6 | 4.3% | 3.9% | 4.6% |
| Pea protein | 5.1 | 5.1 | 5.1 | 8.5% | 7.8% | 9.2% |
| Cinnamon | 0.024 | 0.024 | 0.024 | 0.04% | 0.04% | 0.04% |
| Molasses | 4.4 | 4.4 | 4.4 | 7.3% | 6.6% | 7.8% |
| Water | 1.4 | 1.4 | 1.4 | 2.4% | 2.2% | 2.5% |
| S. cerevisiae containing | 10.3 (5.5) | 16.25 (8.7) | 6.0 (3.2) | 17.1% (9.1%) | 24.6% (13.2%) | 10.8% (5.8%) |
| chicken profilin (protein | | | | | | |
| contribution from | | | | | | |
| S. cerevisiae) | | | | | | |

[0384] The treat was produced using the following method. The dry ingredients were mixed in a bowl. See FIG. 9. Next, the dry and wet ingredients were added to an electric mixer and mixed until the ingredients formed a dough-like consistency. Then the dough was compacted into the mold using a rolling pin. See FIG. 10A. The mold made a perforated pattern into the dough so that individual pieces can be broken off. See FIG. 10B. Finally, the treat was baked for 30 min at 250° F., and then dehydrated for 12 hours at 90° F.

### Results

[0385] Three dog treats containing different amounts of the recombinant chicken profilin protein (3 grams, 5 grams, and 8 grams) were made. See FIGS. 11A-C. Taken together, the examples above demonstrate that the recombinant chicken profilin protein can be used to make treat composition that has a higher amount of essential amino acids.

### 6.9.14. Example 14: Production of Recombinant Coronin Protein from Chicken in an Saccharomyces cerevisiae Host Cell

[0386] This study was conducted to determine if an S. cerevisiae host cell could express a coronin protein from chicken.

[0387] Coronin has been classified as a side-binder and signaling protein. See Winder and Ayscough, J. Cell Science (2005) 118(4): 651-654. The particular coronin used here (coronin 6) is muscle-specific.

### Methods

[0388] Identification of the Coronin Gene Sequence from a Chicken Genome

[0389] The sequence of chicken coronin was obtained by searching Uniprot.org. The UniProt accession number was F1NXA5. The amino acid sequence was:

[SEQ ID NO: 5]
MSRRVVRQSKFRHVFGQPVKADQMYEDIRVSKVTWDSSFCAVNPKFVAI
IVEAGGGGAFMVLPLAKTGRVDKNHPLVTGHTAPVLDIDWCPHNDNVIA
SASEDTTVMVWQIPDYVPVRSITEPVVTLEGHSKRVGIICWHPTARNVL
LSAGCDNLVILWNVGTGEMLLALEDMHTDLIYNVGWNRNGSLLVTTCKD
KKVRVIDPRKQTVVAEITKPHDGARPIRAIFMADGKIFTTGFSKMSERQ
LGLWDLKNFEEPIALQEMDTSNGVLLPFYDPDTNIVYLCGKGDSSIRYF
EITDEAPYVHYLNTYSSKEPQRGMGFMPKRGLDVSKCEIARFFKLHERK
CEPIVMTVPRKSDLFQDDLYPDTPGPEPALEADEWLSGKDAEPILISLR
DGYVPVKNRELKVVKKNILDSKPPPGPRRSHSTSNTDISTPALDEVLEE
IRVLKETVQAQEKRISALEHKLCQFTNGTD

### Codon Optimization of Coronin

[0390] The amino acid sequence was codon optimized for expression in S. cerevisiae using ATUM's GeneGPS™ algorithm. The resulting gene sequence was:

[SEQ ID NO: 6]
ATGTCTCGTAGAGTTGTTAGACAATCCAAGTTCCGTCACGTGTTCGGCC
AACCAGTTAAGGCAGATCAGATGTACGAAGATATCAGAGTTTCAAAGGT
TACCTGGGACTCATCTTTTTGCGCTGTTAACCCAAAGTTCGTAGCAATA
ATTGTGGAAGCTGGCGGTGGGGGAGCATTTATGGTTTTACCACTAGCCA
AGACTGGTAGAGTCGACAAAAATCACCCTTTAGTCACTGGACATACAGC
ACCTGTATTAGATATTGACTGGTGTCCACATAACGACAATGTTATTGCA
AGTGCATCTGAGGATACAACTGTCATGGTATGGCAAATCCCAGACTACG
TTCCAGTAAGATCAATCACAGAACCAGTTGTCACGCTCGAGGGTCACTC
TAAGAGAGTTGGCATTATCTGTTGGCATCCTACAGCCAGAAATGTGTTG
TTGTCTGCCGGTTGCGATAACTTGGTAATTCTTTGGAACGTCGGTACAG
GCGAAATGTTGCTGGCGCTTGAAGATATGCACACTGACCTCATTTACAA
CGTCGGATGGAACAGAAACGGGTCGTTATTAGTCACCACATGTAAAGAT
AAAAAGGTAAGGGTTATCGACCCTAGAAAGCAAACAGTTGTTGCGGAAA
TCACAAAGCCACATGATGGTGCTAGACCAATTAGAGCTATATTCATGGC
CGATGGTAAGATTTTCACAACCGGATTCTCAAAAATGTCCGAGAGACAA
CTTGGGTTGTGGGATCTTAAAAACTTCGAGGAACCAATTGCTCTGCAGG
AAATGGATACTAGTAATGGTGTTTTGTTACCATTTTACGACCCAGACAC
AAACATCGTTTACCTCTGCGGCAAGGGTGATAGTAGCATCAGATATTTT
GAGATAACAGATGAAGCTCCTTACGTCCATTACTTGAATACTTACTCCT
CAAAGGAACCACAGAGAGGTATGGGATTCATGCCAAAGCGAGGACTAGA
TGTTTCTAAGTGTGAAATCGCTAGATTTTTCAAGTTACATGAGAGAAAA
TGCGAACCTATTGTGATGACAGTGCCTAGAAAATCTGATTTGTTCCAAG
ATGATCTATATCCAGATACTCCTGGCCCAGAACCAGCCCTTGAAGCTGA
TGAATGGTTATCTGGTAAAGATGCAGAGCCAATACTAATTTCTCTTAGA
GATGGGTACGTCCCAGTGAAAAACAGAGAGTTGAAAGTTGTTAAAAAAA
ATATTTTGGATAGCAAGCCTCCTCCAGGTCCTCGTAGATCTCACTCCAC
ATCAAACACCGATATATCAACACCAGCTTTGGATGAAGTTTTAGAGGAA
ATCCGGGTGTTGAAGGAAACTGTACAAGCACAAGAGAAGAGAATCTCAG
CACTGGAACATAAGCTATGTCAATTTACTAATGGTACCGACTAA

### Cloning of Coronin Gene

[0391] The gene was synthesized by ATUM and cloned into the pD1205 vector (ATUM), which is a 2-micron episomal vector that has a GAL1-promoter and the TRP1 selection marker gene. This expression vector was designated as (“pBOND2”).

[0392] The pBOND2 expression vector was transformed into chemically competent E. coli strain 5-alpha (New England Biolabs) by heat-shock transformation following the manufacturer's protocol. Selection for transformation was conducted on LB agar plates containing 25 μg/mL chloramphenicol. Colonies were patched on fresh LB agar plates with chloramphenicol and grown in liquid LB with 25 μg/mL chloramphenicol at 37° C. until saturation. The expression vector was purified using the Zyppy plasmid miniprep kit (Zymo Research) following the manufacturer's instructions. The gene insert was verified by PCR and restriction digestion. The expression vector was transformed into S. cerevisiae strain sBOND1 strain by electroporation using a Bio-Rad Gene Pulser™.

[0393] The cell suspension was spread onto selection plates comprising dropout tryptophan plates containing 6.8 g/L yeast nitrogen base without amino acids (Sigma Y0626), and 1.9 g/L yeast synthetic dropout medium without tryptophan (Sigma Y1876), and 2% glucose).

### Cell Culture

[0394] Cells were grown in a medium containing 6.8 g/L yeast nitrogen base without amino acids (Sigma Y0626), 1.9 g/L yeast dropout supplements without tryptophan (Sigma Y1876) and 20 g/L raffinose, until the culture reached an OD600 of 1, at which time coronin expression was induced by adding 20 g/L galactose (from a sterile filtered 40% (w/v) solution). After induction, cells were grown for an additional 18 hours. At the end of induction, the OD600 was around 8.

### Protein Analysis

[0395] Samples were taken at the time of induction, after 5 hours after induction, and at the end of the cultivation. The cells were lysed as described in Example 10. Equal amounts of total protein were loaded onto each lane and analyzed by SDS-PAGE using a precast SDS-PAGE gel (MiniProtean TGX, 4-20% gradient, Bio-Rad). Proteins were visualized by Coomassie staining, see FIG. 12.

### Results

[0396] FIG. 12 shows the results of the SDS-PAGE analysis. The size of coronin is 53 kDa. Lane 1 shows the molecular weight marker. Lane 2 shows protein expression before induction. Lane 3 shows protein expression 5 hours after induction. Lane 4 shows protein expression 18 hours after induction.

[0397] Lanes 2-4 show an increasing amount of a 53 kDa protein, the expected size of codon optimized coronin protein. These results demonstrate that a chicken coronin protein can be produced in a S. cerevisiae host cell.

### 6.9.15. Example 15: Production of Recombinant Myozenin-1 Protein from Turkey in an Saccharomyces cerevisiae Host Cell

[0398] This study was conducted to determine if an S. cerevisiae host cell could express a myozenin-1 protein from turkey.

[0399] Myozenins function as calcineurin-interacting proteins that help tether calcineurin to the sarcomere of cardiac and skeletal muscle. They play an important role in modulation of calcineurin signaling. Myozenin 1 is predominantly expressed in fast-twitch skeletal muscle.

### Methods:

[0400] Identification of the Myozenin-1 Gene Sequence from a Turkey Genome

[0401] The sequence of turkey myozenin-1 was obtained by searching https://www.ncbi.nlm.nih.gov. The NCBI Reference number was XP_010712691.1. The amino acid sequence was:

[SEQ ID NO: 7]
MPLAGTPAPLKRKKPTKLIGKLTHEVMPQEVTKLNLGKKISIPRDVMLE
ELSLLTNKGSKMFKLRQLRVEKFIYENNPDAFSDNSVDHFQRFIPSGGH
YGEDAHGYGHGRMVGGVTAGQHGSSKQHYSTVPPRPGSKGGPGNSEGEH
EAEKSAGSAGGGHGTEKDGKSGGKKPLLKTYISPWERAMGISPEDKSQL
TIDLLSYSPKADFPHYKSFNRTAMPYGGYEKAAKRMTFKVPQFDICPLL
PESIVLYNQNFRNRPSFNRTPIPWMPSGESSEYHTDINVPRSGETEEL

### Codon Optimization of Myozenin-1

[0402] The amino acid sequence was codon optimized for expression in S. cerevisiae using ATUM's GeneGPS™ algorithm. The resulting gene sequence was:

[SEQ ID NO: 8]
ATGCCTTTAGCCGGAACCCCAGCACCATTGAAGAGAAAAAAGCCAACAA
AACTTATTGGTAAGCTGACACACGAAGTTATGCCACAGGAAGTTACCAA
GTTGAATCTAGGTAAAAAGATTTCTATCCCTAGAGATGTCATGTTGGAA
GAGTTATCGTTATTGACGAACAAAGGTTCCAAAATGTTCAAGTTGAGAC
AATTAAGAGTCGAGAAATTCATTTACGAAAACAATCCAGACGCATTCTC
CGATAACAGTGTTGATCATTTTCAACGTTTTATCCCATCTGGTGGACAT
TATGGTGAAGATGCCCATGGGTACGGTCATGGTCGTATGGTTGGGGGCG
TTACAGCCGGGCAACATGGTTCATCAAAGCAACATTACAGTACCGTGCC
TCCTCGACCTGGTTCTAAGGGTGGTCCAGGTAACTCTGAGGGTGAACAT
GCTGAAAAGTCAGCTGGGTCTGCTGGAGAGGGCGGCCACGGTACAGAAA
AGGATGGTAAGAGTGGTGGCAAAAAGCCTCTACTTAAGACTTACATCAG
CCCATGGGAGAGAGCGATGGGAATCTCACCAGAGGATAAGAGCCAGTTA
ACTATTGATCTTCTATCATATTCACCAAAGGCAGACTTCCCACACTACA
AATCTTTTAACAGAACAGCAATGCCATACGGCGGATACGAAAAAGCTGC
TAAGAGAATGACATTTAAGGTACCTCAATTCGATATCTGTCCACTGTTG
CCAGAATCCATAGTACTCTACAACCAAAATTTCAGAAACAGACCATCAT
TCAATAGAACTCCTATACCTTGGATGCCATCTGGCGAATCTTCCGAATA
CCACACTGACATTAACGTGCCAAGATCTGGAGAAACAGAGGAATTGTAA

### Cloning of Myozenin-1

[0403] The gene was synthesized by ATUM and cloned into the pD1211 (ATUM) vector, which is a yeast episomal plasmid, containing a 2-micron origin of replication, and the LEU2 selection marker. Expression of turkey myozenin-1 was driven by a yeast TEF1 promoter. This expression vector was designated as (“pBOND11”).

[0404] The pBOND11 expression vector was introduced into the host cell, S. cerevisiae ATCC® MYA-1108™ designated as (“sBOND28”) by transformation using Zymo Research™ Frozen-EZ Yeast Transformation II kit following the manufacturer's instructions. Transformants were selected using synthetic complete medium lacking leucine.

### Cell Culture

[0405] Cells were grown in flasks with selective media lacking leucine, containing 20 g/l glucose until the culture reached saturation, at which point the cells were collected by centrifugation.

### Protein Analysis

[0406] Cell pellets were weighed, and protein extracts were prepared using the Thermo Scientific™ YPER Yeast Protein Extraction Reagent according to manufacturer's instructions. Yeast extracts were quantitated using the Pierce™ BCA Protein Assay Kit according to manufacturer's guidelines. Equal amounts of total protein were loaded on each lane analyzed by SDS-PAGE. Proteins were visualized by Coomassie staining, see FIG. 13.

### Results

[0407] FIG. 13 shows a photograph of the SDS-PAGE gel after staining. The molecular size of myozenin-1 is 32 kDa. Lane 1 shows the molecular weight marker. Lane 2 shows the host cell (sBOND28). Lane 3 shows the host cell (sBOND28) with pBOND11 expressing myozenin-1 protein (clone 1). Lane 4 shows the host cell (sBOND28) with pBOND11 expressing myozenin-1 protein (clone 2).

[0408] We observed an increased expression of a 32 kDa protein with the clones expressing myozenin-1 protein (lanes 3-4), compared to the empty vector control strain (lane 2). These results demonstrate that an S. cerevisiae host cell could robustly produce a turkey myozenin-1 protein.

### 6.9.16. Example 16: Production of Recombinant Troponin C Protein from Pig in an Saccharomyces cerevisiae Host Cell

[0409] This study was conducted to determine if an S. cerevisiae host cell could express a troponin C protein from pig.

[0410] Troponin C is a protein that resides in the troponin complex on actin thin filaments of striated muscle and is responsible for binding calcium to activate muscle contraction.

### Methods:

[0411] Identification of the Troponin C Gene Sequence from a Pig Genome

[0412] The sequence of pig troponin C, skeletal muscle, was obtained by searching https://www.ncbi.nlm.nih.gov. The NCBI reference number NP_001001862.1. The amino acid sequence was:

[SEQ ID NO: 9]
MTDQQAEARSYLSEEMIAEFKAAFDMFDADGGGDISVKELGTVMRMLGQ
TPTKEELDAIIEEVDEDGSGTIDFEEFLVMMVRQMKEDAKGKSEEELAE
CFRIFDRNADGYIDAEELAEIFRASGEHVTDEELESLMKDGDKNNEGRI
DFDEFLKMMEGVQ

### Codon-Optimization of Troponin C

[0413] The amino acid sequence was codon-optimized for expression in S. cerevisiae using ATUM's GeneGPS™ algorithm. The resulting gene sequence was:

[SEQ ID NO: 10]
ATGACTGATCAACAAGCTGAAGCAAGATCTTACCTTAGTGAAGAGATGA
TAGCAGAGTTTAAGGCAGCGTTCGATATGTTCGATGCCGACGGTGGTGG
CGATATCTCTGTGAAGGAACTCGGTACAGTTATGAGAATGCTGGGGCAA
ACACCAACCAAGGAAGAGTTGGATGCAATCATCGAAGAGGTCGACGAAG
ATGGGTCAGGTACAATTGATTTTGAAGAGTTTTTGGTTATGATGGTAAG
ACAGATGAAAGAGGATGCTAAGGGTAAGTCAGAAGAGGAATTAGCTGAA
TGTTTTAGAATTTTCGATAGAAATGCTGATGGATACATTGACGCTGAGG
AACTAGCCGAAATTTTCCGTGCCTCTGGAGAACATGTCACTGATGAGGA
ATTGGAATCCTTAATGAAAGATGGCGACAAAAACAACGAGGGTAGAATC
GACTTCGACGAATTCCTTAAGATGATGGAAGGCGTTCAATAA

[0414] The gene was synthesized by ATUM and cloned into the pD1205 (ATUM) vector, which is a 2-micron episomal vector that has GAL1-promoter and the TRP1 gene to allow selection when transformed into a strain with tryptophan auxotrophy. The resulting expression vector was designated (“pBOND19”).

[0415] Transformation of pBOND19 into the S. cerevisiae host cell (“sBOND1”) was carried out using Zymo Research™ Frozen-EZ Yeast Transformation II kit following the manufacturer's instructions and selecting on synthetic complete media lacking tryptophan. An empty vector control (pBOND8) strain was prepared using the same host cell.

### Cell Culture

[0416] Cells were grown in flasks on selective media (lacking tryptophan) containing 2% (w/v) raffinose until the culture reached an OD600 of 1. Galactose was added to a final concentration of 2% (w/v) to induce expression of the protein. After induction, cultures were grown for another 24 hours with vigorous shaking.

### Protein Analysis

[0417] Cell pellets were weighed, and protein extracts were prepared using the Thermo Scientific™ YPER Yeast Protein Extraction Reagent according to manufacturer's instructions. Samples were quantitated using the Pierce™ BCA Protein Assay Kit according to the manufacturer's guidelines. Equal amounts of total protein were loaded onto each lane and analyzed by SDS-PAGE. Proteins were visualized by Coomassie staining, see FIG. 14.

### Results

[0418] FIG. 14 shows the stained SDS-PAGE gel. The molecular size of troponin C is 18 kDa. Lane 1 shows a molecular weight marker. Lane 2 shows the host cell (sBOND1) with an empty vector (pBOND8). Lane 3 shows the host cell (sBOND1) with pBOND19 expressing the troponin C protein (clone 1). Lane 4 shows the host cell (sBOND1) with pBOND19 expressing the troponin C protein (clone 2).

[0419] We observed an 18 kDa protein in lanes 3-4. Notably, there was no such 18 kDa protein observed in the empty control strain (lane 2). These results demonstrate that a S. cerevisiae host cell could produce a pig troponin C protein.

### 6.9.17. Example 17: Production of Recombinant Cofilin-2 from Chicken in a Komagataella phaffii Host Cell

[0420] This study was conducted to determine if a Komagataella phaffii (formerly known as Pichia pastoris) host cell could express a cofilin-2 protein from chicken.

### Methods:

[0421] Identification of the Cofilin-2 Gene Sequence from a Chicken Genome

[0422] The sequence of chicken cofilin-2 was obtained by searching https://www.ncbi.nlm.nih.gov. The NCBI reference number was NP_001004406.1. The amino acid sequence was [SEQ ID NO: 1].

### Codon Optimization of Cofilin-2

[0423] The amino acid sequence was codon optimized for expression in K. phaffii using ATUM's GeneGPS™ algorithm. The resulting gene sequence was:

[SEQ ID NO: 11]
ATGGCTTCTGGTGTGACTGTTAACGACGAAGTCATCAAGGTATTCAATG
ATATGAAAGTTAGAAAATCATCCACTCCAGAGGAAATCAAAAAGAGAAA
AAAAGCCGTTCTATTTTGCCTGTCGGACGACAAAAAGCAGATCATCGTT
GAGGAAGCCACACGTATTTTGGTCGGTGACATTGGTGACACAGTCGAAG
ATCCTTATACTGCTTTTGTTAAGCTGTTGCCCTTAAATGATTGTAGGTA
CGCTCTGTACGACGCAACTTACGAAACCAAAGAGTCCAAAAAAGAGGAT
TTGGTGTTCATCTTCTGGGCACCTGAAAGTGCTCCACTTAAGAGCAAGA
TGATTTATGCATCCTCTAAAGATGCTATTAAAAAAAAGTTTACAGGTAT
AAAGCATGAGTGGCAAGTGAACGGATTGGATGACATTAAAGATAGATCT
ACGTTGGGCGAAAAGCTTGGTGGAAATGTTGTAGTGTCATTAGAGGGAA
AGCCACTCTAA

### Cloning of Cofilin-2

[0424] The gene was synthesized by ATUM and cloned into the pD902 vector (ATUM), which is a yeast integrating plasmid that has a zeocin resistance gene for selection, and an AOX1 promoter. The resulting expression vector was designated as (“pBOND24”).

[0425] Komagataella phaffii (formerly Pichia pastoris) PPS-9016 was obtained from ATUM and designated as (“sBOND2”). The pBOND24 expression vector was linearized using the restriction enzyme PmeI and was introduced into the sBOND2 host cell by transformation using Zymo Research™ Frozen-EZ Yeast Transformation II kit following the manufacturer's instructions. Cells were allowed to recover overnight in non-selective media, and the following day they were plated on selective plates containing YPD (10 g/l yeast extract, 20 g/l peptone, 20 g/l glucose) with either 250 μg/ml or 1000 μg/ml zeocin.

### Cell Culture

[0426] The cells were grown in baffled flasks in BMGY plus zeocin media (10 g/l yeast extract, 20 g/l peptone, 13.4 g/L yeast nitrogen base (without amino acids), 100 mM potassium phosphate pH 6, 0.004 mg/L biotin, 1% (v/v) glycerol, and 500 μg/ml zeocin) until the culture reached an OD600 of 1. Methanol was added to a final concentration of 0.5% (v/v) to induce expression of the protein. After induction, cultures were grown for another 60 hours with vigorous shaking, and methanol was added every 24 hours to maintain and/or boost induction of protein expression.

### Protein Analysis

[0427] Cell cultures were collected by centrifugation and cell pellets were weighed. Protein extracts were prepared using the Thermo Scientific™ YPER Yeast Protein Extraction Reagent according to the manufacturer's instructions. Yeast extracts were quantitated using the Pierce™ BCA Protein Assay Kit according to the manufacturer's guidelines. Equal amounts of total protein were loaded to each lane and analyzed by SDS-PAGE. Proteins were visualized by Coomassie staining, see FIG. 15.

### Results

[0428] FIG. 15 shows the results of the SDS-PAGE gel. The molecular size of cofilin-2 is 19 kDa. Lane 1 shows the molecular weight marker. Lane 2 shows the host cell (sBOND2). Lane 3 shows the host cell (BOND2) with pBOND24 expressing the cofilin-2 protein (clone #2). Lane 4 shows the host cell (sBOND2) with pBOND24 expressing the cofilin-2 protein (clone #3). Lane 5 shows the host cell (sBOND2) with pBOND24 expressing the cofilin-2 protein (clone #5).

[0429] We observed a strong band at 19 kDa in the cofilin-2 expressing clones (lanes 3-5), while no such band was observed in the control lane (lane 2). These results demonstrate that a Komagataella phaffii host cell could robustly produce a chicken cofilin-2 protein.

### 6.9.18. Example 18: Production of Recombinant Profilin Protein from Chicken in a Komagataella phaffii Host Cell

[0430] This study was conducted to determine if a Komagataella phaffii host cell could express a profilin protein from chicken.

### Methods

[0431] Identification of Profilin Gene Sequence from Chicken

[0432] The sequence of chicken profilin was obtained by searching Uniprot.org. The UniProt accession number is Q5ZL50. The amino acid sequence was: [SEQ ID NO:34]

### Condon Optimization of Profilin

[0433] The amino acid sequence was codon optimized for K. phaffii using ATUM's GeneGPS™ algorithm. The resulting gene sequence was:

[SEQ ID NO: 12]
ATGGCCGGTTGGCAATCCTATGTAGACAATCTAATGTGTGACGGGTGTT
GCCAAGAGGCAGCAATTGTGGGTTACTGCGATGCTAAATACGTTTGGGC
AGCAACAGCCGGCGGAATCTTCCAATCAATAACCCCAGTGGAAATTGAT
ATGATTGTTGGAAAAGACCGTGAGGGATTTTTCACTAATGGTTTGACTC
TGGGTGCTAAAAAGTGTTCCGTTATCCGTGATAGCTTGTATGTCGATGG
TGACTGTACTATGGATATCAGGACAAAGTCGCAGGGTGGTGAACCTACG
TATAACGTAGCTGTCGGTAGAGCTGGAAGAGTGTTAGTCTTTGTTATGG
GTAAAGAGGGTGTTCATGGCGGTGGACTTAACAAAAAGGCTTACAGTAT
GGCTAAGTACTTGAGAGACTCTGGATTCTAA

### Cloning of Profilin

[0434] The gene was synthesized by ATUM and cloned into the pD902 vector, which is a yeast integrating plasmid that has a zeocin resistance gene to allow for the selection of transformants, and an AOX1 promoter. The resulting expression vector was designated (“pBOND25”).

[0435] Komagataella phaffii (formerly Pichia pastoris) PPS-9016 was obtained from ATUM and designated as (“sBOND2”). pBOND25 was linearized using the restriction enzyme, PmeI and was transformed into sBOND2 using the Zymo Research™ Frozen-EZ Yeast Transformation II kit following the manufacturer's instructions. Cells were allowed to recover overnight in non-selective media, and the following day they were plated on YPD agar plates containing 1000 μg/ml zeocin for selection.

### Cell Culture

[0436] Cells were grown in flasks in BMGY plus zeocin media (10 g/l yeast extract, 20 g/l (w/v) peptone, 13.4 g/l yeast nitrogen base (without amino acids), 100 mM potassium phosphate pH 6.0, 0.004 mg/l biotin, 1% (v/v) glycerol, and 500 μg/ml zeocin) until the culture reached a OD600 of 1. Methanol was added to a final concentration of 0.5% (v/v) to induce expression of the protein. After induction, cultures were grown for an additional 60 hours with vigorous shaking. Methanol was added every 24 hours after the first time to maintain and/or boost induction of protein expression.

### Protein Analysis

[0437] Cell cultures were collected by centrifugation and cell pellets were weighed. Protein extracts were prepared using the Thermo Scientific™ YPER Yeast Protein Extraction Reagent according to manufacturer's instructions. Yeast extracts were quantitated using the Pierce™ BCA Protein Assay Kit the according to manufacturer's guidelines. Equal amounts of total protein were loaded on each lane and analyzed by SDS-PAGE. Proteins were visualized by Coomassie staining, see FIG. 16.

### Results

[0438] FIG. 16 shows the results of the SDS-PAGE gel. The molecular size of profilin is 15 kDa. Lane 1 shows the molecular weight marker. Lane 2 shows the host cell (sBOND2). Lane 3 shows the host cell (sBOND2) with pBOND25 expressing the profilin protein (clone 1). Lane 4 shows the host cell (sBOND2) with pBOND25 expressing the profilin protein (clone 2). Lane 5 shows the host cell (sBOND2) with pBOND25 expressing the profilin protein (clone 3).

[0439] We observed a protein band at 15 kDa, in the profilin expressing clones (lanes 3-5), while no such band was observed in the empty control strain (lane 2). These results demonstrate that a Komagataella phaffii host cell could produce a chicken profilin protein.

### 6.9.19. Example 19: Production of Recombinant Profilin Protein from Chicken in a Kluyveromyces lactis Host Cell

[0440] This study was conducted to determine if a Kluyveromyces lactis host cell could express a profilin protein from chicken.

### Methods

[0441] Identification and Cloning of Profilin Gene from Chicken

[0442] The identification and cloning of the profilin gene were carried out as described in Example 10.

[0443] The profilin gene [SEQ ID NO: 4] was amplified from pBOND3 (origin and cloning described in Example 10) using the cloning primers oBOND20 and oBOND21 (Table 11). The resulting PCR fragment was digested with restriction enzymes HindIII and NdeI, gel purified, and then ligated with T4 DNA ligase into the integrating vector pKLAC2 (New England Biolabs). The vector was then linearized with the same restriction enzymes and dephosphorylated by Quick CIP (New England Biolabs). This generated the expression vector designated as (“pBOND22”).

[0444] The pBOND22 expression vector was transformed into 10-beta competent cells (New England Biolabs) by heat-shock transformation and the transformants were selected on LB agar plates containing 100 μg/mL carbenicillin. A few colonies were cultured in LB with 100 μg/mL carbenicillin and the expression vector was purified using the Zyppy plasmid miniprep kit (Zymo Research) by following the manufacturer's instructions. The gene insert was verified by restriction digestion.

[0445] The pBOND22 expression vector was linearized using the restriction enzyme SacII and desalted using the PCR and Cleanup kit (Monarch) and transformed into an K. lactis host cell GG799 (New England Biolabs) designated as (“sBOND68”) by chemical transformation. Two negative controls were prepared, an empty vector designated as (“pBOND27”), and a control gene expressing a maltose-binding protein designated as (“pBOND28”) transformed into the same host cell. Cells were grown on YCB agar plates containing 5 mM acetamide, for 4 days at 30° C. Several colonies were patched on new YCB agar plates containing 5 mM acetamide.

### Cell Culture and Protein Analysis

[0446] A few colonies were inoculated into YPGal medium (10 g/L yeast extract, 20 g/L peptone, and 20 g/l galactose) and allowed to grow at 30° C.

[0447] Samples were taken and analyzed after approximately 24 hours, when the OD600 range was about 25-30. Cell cultures were collected by centrifugation and cell pellets were weighed. The cells were lysed as described in Example 10. Equal amounts of total protein estimated by OD600 values loaded on each lane and analyzed by SDS-PAGE. Proteins were visualized by Coomassie staining, see FIG. 17.

### Results

[0448] FIG. 17 shows the SDS-PAGE gel. The molecular size of profilin is 15 kDa. Lane 1 shows the host cell (sBOND68) with pBOND22 expressing the profilin protein (clone 2). Lane 2 shows the host cell (sBOND68) with pBOND22 expressing the profilin protein (clone 3). Lane 3 shows the host cell (sBOND68) with pBOND27 empty vector. Lane 4 shows host cell (sBOND68) with pBOND28 expressing the control gene, maltose-binding protein. Lane 5 shows the molecular weight marker.

[0449] We observed a 15 kDa protein in the profilin expressing clones (lanes 1-2), while no such band was observed in the empty vector control or the control gene (lanes 3-4). These results demonstrate that a K. lactis host cell could produce a chicken profilin protein.

### 6.9.20. Example 20: Production of Recombinant Profilin Protein from Chicken in a Schizosaccharomyces pombe Host Cell

[0450] This study was conducted to determine if a Schizosaccharomyces pombe host cell could express a profilin protein from chicken.

Identification and Cloning of Profilin Gene from Chicken

[0451] The identification and cloning of the profilin gene were carried out as described in Example 10.

[0452] The profilin gene [SEQ ID NO: 4] was amplified from pBOND3 expression vector using primers oBOND5 and oBOND6 (see Table 11). The PCR fragment was digested with restriction enzymes XhoI and SmaI, gel purified, and then ligated into pBOND10 (REP4X [ATCC 87604]) vector which was cut with the same restriction enzymes. This placed the profilin gene in front of the S. pombe nmtl promoter and generated the expression vector designated as (“pBOND29”), which is a high copy plasmid.

[0453] The pBOND29 expression vector was introduced into an S. pombe strain, designated as (“sBOND3”) using the Zymo Research™ Frozen-EZ Yeast Transformation II kit following the manufacturer's instructions. An empty vector “pBOND10” strain was also generated using the same host cell.

### Cell Culture

[0454] Cell were grown in flasks in glucose selective media, lacking uracil and containing thiamine, to repress the expression of profilin, until the culture reached an OD600 of 1. Next, cells were transferred to media lacking thiamine, to induce expression of profilin. Subsequently, the cells were grown at 37° C. for an additionally 30 hours with vigorous shaking. After, cells were collected by centrifugation.

### Protein Analysis

[0455] Protein extracts were prepared by treating cells with 0.3N NaOH for 15 minutes, and then boiling the cell pellet in SDS sample buffer for 5 minutes (Matsuo, Asakawa, Toda, & Katayama, 2006, A Rapid Method for Protein Extraction from Fission Yeast. Bioscience, Biotechnology, and Biochemistry, 70(8), 1992-1994). Equal amounts of total protein were loaded on each lane and analyzed by SDS-PAGE. Proteins were visualized by Coomassie staining, see FIG. 18.

### Results

[0456] FIG. 18 shows the results of the SDS-PAGE gel. Lane 1 shows the molecular weight marker. Lane 2 shows the host cell (sBOND3) with the vector pBOND10 empty vector. Lane 3 shows the host cell (sBOND3) with pBOND29 expressing the profilin protein (clone 2). Lane 4 shows the host cell (sBOND3) with pBOND29 expressing the profilin protein (clone 3). Lane 5 shows the host cell (sBOND3) with pBOND29 expressing the profilin protein (clone 5).

[0457] We observed a protein at 15 kDa, in the sBOND3 profilin expressing clones (lanes 3-5), while no such band was observed in the pBOND10 empty vector strain (lane 2). These results demonstrate that a S. pombe host cell could express a chicken profilin protein.

### 6.9.21. List of Strains, Expression Vectors, and Oligonucleotides

TABLE 9
Host Cell Strains

| | | Other | |
|---|---|---|---|
| Name | Species | designation | Genotype |
| sBOND1 | Saccharomyces | ATCC 208288 | MATalpha ura3-52 trp1 leu2- |
| | cerevisiae | | delta1 his 3-delta200 pep4::HIS3 |
| | | | prb1-delta1.6R can1 GAL |
| sBOND2 | Komagataella | Pichia pastoris | pep4Δ prb1Δ |
| | phaffii | PPS-9016 | |
| sBOND3 | Schizosaccharomyces | FY118/ATCC | h90 ura4-D18 |
| | pombe | 201401 | leu1-32 ade6-M216 |
| sBOND28 | Saccharomyces | ATCC MYA-1108 | MATa trp1-289 leu2-3 leu2-112 |
| | cerevisiae | CEN.PK2-1Ca | ura3-52 his3-delta1MATa |
| | | | trp1-289 leu2-3 leu2-112 |
| | | | ura3-52 his3-delta1 |
| sBOND68 | Kluyveromyces | GG799 | MATα |
| | lactis | | [pGKI1⁺] |

*MBP = Maltose binding protein

TABLE 10
Expression Vectors

| | | | Bacterial | Yeast | |
|---|---|---|---|---|---|
| Name | Other designation | Gene | marker | marker | Promoter |
| pBOND2 | pD1205-Chck_Coronin | Chicken | CmR | TRP1 | GAL1 |
| | | coronin | | | |
| pBOND3 | pD1205-Chck_Profilin | Chicken | CmR | TRP1 | GAL1 |
| | | profilin | | | |
| pBOND4 | pD1248-Chck_Cofilin-2 | Chicken | AmpR | URA3 | GAL1 |
| | | cofilin-2 | | | |
| pBOND8 | pRS424 | Empty | AmpR | TRP1 | GAL1 |
| | | Control | | | |
| pBOND10 | pREP4x | Empty | AmpR | ura4⁺ | NMT1 |
| | | Control | | | |
| pBOND11 | pD1211_Myozenin-1 | Turkey | KanR | LEU2 | TEF1 |
| | | myozenin1 | | | |
| pBOND19 | pD1205_Pig_TroponinC | Pig | CmR | TRP1 | GAL1 |
| | | troponinC | | | |
| pBOND21 | pRS424 P-GAP_Cofilin2 | Chicken | AmpR | TRP1 | GAL1 |
| | | cofilin-2 | | | |
| pBOND22 | pKLAC2_P-LAC4_Profilin | Chicken | AmpR | amdS | LAC4 |
| | | profilin | | | |
| pBOND24 | pD902_Chck_Cofilin-2 | Chicken | ZeocinR | ZeocinR | AOX1 |
| | | cofilin-2 | | | |
| pBOND25 | pD902_Chck_Profilin | Chicken | ZeocinR | ZeocinR | AOX1 |
| | | profilin | | | |
| pBOND27 | pKLAC2 | Empty | AmpR | amdS | LAC4 |
| | | Control | | | |
| pBOND28 | pKLAC1-malE | MBP* | AmpR | amdS | LAC4 |
| pBOND29 | pREP4x-Chck_Profilin-5 | Chicken | AmpR | ura4⁺ | NMT1 |
| | | profilin | | | |

TABLE 11
Oligonucleotide primers for cloning

| SEQ ID NO: | Name | Sequence of Oligonucleotide |
|---|---|---|
| SEQ ID NO: 13 | oBOND5 | 5′-ATAACTCGAGATGGCTGGCTGGCAATCTTATG-3′ |
| SEQ ID NO: 14 | oBOND6 | 5′-TCCCGGGTTAAAAACCGGAATCTCTCAAG-3′ |
| SEQ ID NO: 15 | oBOND11 | 5′-TATTCTCGAGACGGATTAGAAGCCGCCGAGC-3′ |
| SEQ ID NO: 16 | oBOND12 | 5′-TACAGAATTCTTTTGCGTGCAGGTGAGG-3′ |
| SEQ ID NO: 17 | oBOND20 | 5′-TATAAGCTTATGGCTGGCTGGCAATCTTATG |
| SEQ ID NO: 18 | oBOND21 | 5′-ATACCATATGTTAAAAACCGGAATCTCTCAAG |

### 7. SEQUENCES

TABLE 1
Sequences of Animal Proteins
Skeletal muscle tissue

| | Accession | | |
|---|---|---|---|
| SEQ ID | number | Common | |
| NO: | (database) | name/animal | Amino acid sequence |
| SEQ ID | A4IFM8 | Actin, alpha 1, | MCDEDETTALVCDNGSGLVKAGFA |
| NO: 19 | (UniProtKB) | skeletal | GDDAPRAVFPSIVGRPRHQGVMVG |
| | | muscle/Bos | MGQKDSYVGDEAQSKKGILTLKYPI |
| | | taurus | EHGIITNWDDMEKIWHHTFYNELRV |
| | | | APEEHPTLLTEAPLNPKANREKMTQI |
| | | | MFETFNVPAMYVAIQAVLSLYASGR |
| | | | TTGIVLDSGDGVTHNVPIYEGYALPH |
| | | | AIMRLDLAGRDLTDYLMKILTERGY |
| | | | SFVTTAEREIVRDIKEKLCYVALDFE |
| | | | NEMATAASSSSLEKSYELPDGQVITI |
| | | | GNERFRCPETLFQPSFIGMESAGIHET |
| | | | TYNSIMKCDIDIRKDLYANNVMSGG |
| | | | TTMYPGIADRMQKEITALAPSTMKIK |
| | | | IIAPPERKYSVWIGGSILASLSTFQQM |
| | | | WITKQEYDEAGPSIVHRKCF |
| SEQ ID | P68137 | Actin, alpha | MCDEDETTALVCDNGSGLVKAGFA |
| NO: 20 | (UniProtKB) | skeletal | GDDAPRAVFPSIVGRPRHQGVMVG |
| | | muscle/Sus | MGQKDSYVGDEAQSKRGILTLKYPI |
| | | scrofa | EHGIITNWDDMEKIWHHTFYNELRV |
| | | | APEEHPTLLTEAPLNPKANREKMTQI |
| | | | MFETFNVPAMYVAIQAVLSLYASGR |
| | | | TTGIVLDSGDGVTHNVPIYEGYALPH |
| | | | AIMRLDLAGRDLTDYLMKILTERGY |
| | | | SFVTTAEREIVRDIKEKLCYVALDFE |
| | | | NEMATAASSSSLEKSYELPDGQVITI |
| | | | GNERFRCPETLFQPSFIGMESAGIHET |
| | | | TYNSIMKCDIDIRKDLYANNVMSGG |
| | | | TTMYPGIADRMQKEITALAPSTMKIK |
| | | | IIAPPERKYSVWIGGSILASLSTFQQM |
| | | | WITKQEYDEAGPSIVHRKCF |
| SEQ ID | P68139 | Actin, alpha | MCDEDETTALVCDNGSGLVKAGFA |
| NO: 21 | (UniProtKB) | skeletal | GDDAPRAVFPSIVGRPRHQGVMVG |
| | | muscle/Gallus | MGQKDSYVGDEAQSKRGILTLKYPI |
| | | gallus | EHGIITNWDDMEKIWHHTFYNELRV |
| | | | APEEHPTLLTEAPLNPKANREKMTQI |
| | | | MFETFNVPAMYVAIQAVLSLYASGR |
| | | | TTGIVLDSGDGVTHNVPIYEGYALPH |
| | | | AIMRLDLAGRDLTDYLMKILTERGY |
| | | | SFVTTAEREIVRDIKEKLCYVALDFE |
| | | | NEMATAASSSSLEKSYELPDGQVITI |
| | | | GNERFRCPETLFQPSFIGMESAGIHET |
| | | | TYNSIMKCDIDIRKDLYANNVMSGG |
| | | | TTMYPGIADRMQKEITALAPSTMKIK |
| | | | IIAPPERKYSVWIGGSILASLSTFQQM |
| | | | WITKQEYDEAGPSIVHRKCF |
| SEQ ID | P68138 | Actin, alpha | MCDEDETTALVCDNGSGLVKAGFA |
| NO: 22 | (UniProtKB) | skeletal | GDDAPRAVFPSIVGRPRHQGVMVG |
| | | muscle/Bos | MGQKDSYVGDEAQSKRGILTLKYPI |
| | | taurus | EHGIITNWDDMEKIWHHTFYNELRV |
| | | | APEEHPTLLTEAPLNPKANREKMTQI |
| | | | MFETFNVPAMYVAIQAVLSLYASGR |
| | | | TTGIVLDSGDGVTHNVPIYEGYALPH |
| | | | AIMRLDLAGRDLTDYLMKILTERGY |
| | | | SFVTTAEREIVRDIKEKLCYVALDFE |
| | | | NEMATAASSSSLEKSYELPDGQVITI |
| | | | GNERFRCPETLFQPSFIGMESAGIHET |
| | | | TYNSIMKCDIDIRKDLYANNVMSGG |
| | | | TTMYPGIADRMQKEITALAPSTMKIK |
| | | | IIAPPERKYSVWIGGSILASLSTFQQM |
| | | | WITKQEYDEAGPSIVHRKCF |
| SEQ ID | P02609 | Myosin | MAPKKAKRRAAEGSSNVFSMFDQT |
| NO: 23 | (UniProtKB) | regulatory light | QIQEFKEAFTVIDQNRDGIIDKDDLRE |
| | | chain 2, skeletal | TFAAMGRLNVKNEELDAMIKEASGP |
| | | muscle | INFTVFLTMFGEKLKGADPEDVIMG |
| | | isoform/Gallu | AFKVLDPDGKGSIKKSFLEELLTTQC |
| | | gallus | DRFTPEEIKNMWAAFPPDVAGNVDY |
| | | | KNICYVITHGEDKEGE |
| SEQ ID | Q9PTY2 | Skeletal myosin | MSSDAEMAIFGEAAPYLRKSEKERIE |
| NO: 24 | (UniProtKB) | heavy | AQNKPFDAKTSVFVVHAKESYVKST |
| | | chain/Gallus | IQSKESGKVTVKTESGETLTVKEDQI |
| | | gallus | FSMNPPKYDKIEDMAMMTHLHEPA |
| | | | VLYNLKERYAAWMIYTYSGLFCVTV |
| | | | NPYKWLPVYNPEVVLAYRGKKRQE |
| | | | APPHIFSISDNAYQFMLTDRENQSILI |
| | | | TGESGAGKTVNTKRVIQYFATIAASG |
| | | | DKKKEEQPAGKMQGTLEDQIISANP |
| | | | LLEAFGNAKTVRNDNSSRFGKFIRIH |
| | | | FGATGKLASADIETYLLEKSRVTFQL |
| | | | KAERSYHIFYQIMSNKKPELIEMLLIT |
| | | | TNPYDYHYVSQGEITVPSINDQEELM |
| | | | ATDSAIDILGFTPDEKTAIYKLTGAV |
| | | | MHYGNLKFKQKQREEQAEPDGTEV |
| | | | ADKAAYLMGLNSADLLKALCYPRV |
| | | | KVGNEFVTKGQTVQQVYNSVGALA |
| | | | KAVFEKMFLWMVVRINQQLDTKQP |
| | | | RQYFIGVLDIAGFEIFDFNSLEQLCIN |
| | | | FTNEKLQQFFNHHMFVLEQEEYKKE |
| | | | GIEWEFIDFGMDLAACIELIEKPMGIF |
| | | | SILEEECMFPKATDTSFKNKLYDQHL |
| | | | GKSNNFQKPKPGKGKAEAHFSLVHY |
| | | | AGTVDYNISGWLDKNKDPLYETVV |
| | | | GLYQKSSLKTLALLFASAGGEAESG |
| | | | GGGKKGGKKKGSSFQTVSALFRENL |
| | | | NKLMTNLRSTHPHFVRCIIPNETKTP |
| | | | GAMEHELVLHQLRCNGVLEGIRICR |
| | | | KGFPSRILYADFKQRYKVLNASAIPE |
| | | | GQFIDSKKASEKLLGSIDVDHTQYKF |
| | | | GHTKVFFKAGLLGLLEEMRDEKLAQ |
| | | | LITRTQARCRGFLMRVEYRRMVERR |
| | | | ESIFCIQYNIRSFMNVKHWPWMKLFF |
| | | | KIKPLLKSAESEKEMANMKGEFEKT |
| | | | KEELAKSGAKRKDLEGKMVSLLQEK |
| | | | NDLQLQVQAEADALADAEERCDQLI |
| | | | KTKIQLEAKIKEVTERAEDEEEINAEL |
| | | | TAKKRKLEDECSELKKDIDDLELTLA |
| | | | KVEKEKHATENKVKNLTEEMAALD |
| | | | ENIAKLTKEKKAPQEAHQQTLDDLQ |
| | | | AEEDKVNTLTKAKTKLEQQVDDLEG |
| | | | SLEQEKKLRMDLERAKRKLEGDLKL |
| | | | AHDSIMDLENDKQQLDEKLKKKDFE |
| | | | ISQIQSKIEDEQALGMQLQKKIKELQ |
| | | | ARTEELEEEIEAERTSRAKAEKHRAD |
| | | | LSRELEEISERLEEAGGATAAQIDMN |
| | | | KKREAEFQKMRRDLEEATLQHEATA |
| | | | AALRKKHADSTAELGEQIDNLQRVK |
| | | | QKLEKEKSELKMEIDDLASNMESVS |
| | | | KAKASLEKTCRALEDQMSEIKTKEE |
| | | | EHQRMINDVNAQRARLQTESGEYSR |
| | | | QVEEKDALISQLSRGKQAFTQQIEEL |
| | | | KRHLEEEIKAKNALAHGLQSARHDC |
| | | | DLLREQYEEEQEAKGELQRALSKAN |
| | | | SEVAQWRTKYETDAIQRTEELEEAK |
| | | | KKLAQRLQDAEEHVEAVNSKCASLE |
| | | | KTKQRLQNEVEDLMIDVERANSACA |
| | | | ALDKKQKNFDKILSEWKQKYEETQA |
| | | | ELEASQKESRSLSTELFKMKNAYEES |
| | | | LDHLETLKRENKNLQQEISDLTEQIA |
| | | | EGGKAIHELEKVKKQIEQEKSELQAS |
| | | | LEEAEASLEHEEGKILRLQLELNQVK |
| | | | SEIDRKIAEKDEEIDQLKRNHLRIVES |
| | | | MQRTLDAEVRSRNEALRLKKKMEG |
| | | | DLNEMEIQLNHANRMAAEAQKNLR |
| | | | NTQGVLKDTQIHLDDALRSQEDLKE |
| | | | QVAMVERRANLLQAETEELRAALEQ |
| | | | TERSRKVAEQELLDASERVQLLHTQ |
| | | | NTSLINTKKKLESDISQIQSEMEDTIQ |
| | | | EARNAEEKAKKAITDAAMMAEELK |
| | | | KEQDTSAHLERMKKNLDQTVKDLQ |
| | | | HRLDEAEQLALKGGKKQIQKLEARV |
| | | | RELEGEVDAEQKRSAEAVKGVRKYE |
| | | | RRVKELTYQSEEDRKNVLRLQDLVD |
| | | | KLQMKVKSYKRQAEEAEELSNVNLS |
| | | | KFRKIQHELEEAEERADIAESQVNKL |
| | | | RVKSREFHKKIEEEEI |
| SEQ ID | A0A1S3L3X1 | Myosin heavy | MSTDAEMQVYGKAAIYLRKSEKER |
| NO: 25 | (UniProtKB) | chain, fast | MEAQAMPFDSKNSCYVTDKVELYL |
| | | skeletal muscle- | KGLVTARADGKCTVTVTKPDGTKEE |
| | | like | GKEFKDADIYEMNPPKYDKIEDMAM |
| | | isoform/Salmo | MTYLNEASVLYNLKERYAAWMIYT |
| | | salar | YSGLFCATVNPYKWLPVYDEEVVN |
| | | | AYRGKKRVEAPPHIFSVSDNAFQFM |
| | | | MIDKENQSVLITGESGAGKTVNTKR |
| | | | VIQYFATIAVSGGKKEADPNKMQGS |
| | | | LEDQIIAANPLLESYGNAKTVRNDNS |
| | | | SRFGKFIRIHFQAGKLAKADIETYLLE |
| | | | KSRVSFQLPDERGYHIFFQMMTGHK |
| | | | PELVELALLTTNPYDFPMCSQGQIAV |
| | | | ASINDNEELDATDEAITILGFTNEEKL |
| | | | GIYKLTGAVVHHGNLKFKQKQREEQ |
| | | | AEPDGTEVADKIAYLLGLNSAEMLK |
| | | | ALCYPRVKVGNEYVTKGQTVAQVN |
| | | | NSVSALAKSIYERMFLWMVIRINEM |
| | | | LDTKNPRQFYIGVLDIAGFEIFDYNS |
| | | | MEQLCINFTNEKLQQFFNHTMFVLE |
| | | | QEEYKKEGIVWAFIDFGMDLAACIEL |
| | | | IEKPLGIFSILEEECMFPKSSDTTFKDK |
| | | | LYAQHLGKTKAFEKPKPAKGKAEA |
| | | | HFSLVHYAGTVDYNITGWLEKNKDP |
| | | | LNDSVCQLYGKSGVKILAALYPPPPP |
| | | | EDKAKKGGKKKGGSMQTVSSQFRE |
| | | | NLHKLMTNLRSTHPHFVRCLIPNESK |
| | | | TPGLMENFLVIHQLRCNGVLEGIRIC |
| | | | RKGFPSRIIYADFKQRYKVLNASVIPE |
| | | | GQFMDNKKASEKLLGSIDVNHEDYK |
| | | | FGHTKVFFKAGLLGVLEEMRDEKLA |
| | | | TLVGMVQALSRGFLMRREFSKMME |
| | | | RRESIYAIQYNIRSFMNVKTWPWMK |
| | | | LYFKIKPLLQSAETEKELANMKENYE |
| | | | KMKTDLAKALSTKKQMEEKLVSLT |
| | | | QEKNDLALQVASEGESLNDAEERCE |
| | | | GLIKSKIQQEAKLKETTERLEDEEEIN |
| | | | AELTAKKRKLEDECSELKKDIDDLEL |
| | | | TLAKVEKEKHATENKVKNLTEEMAS |
| | | | MDESVAKLTKEKKALQEAHQQTLD |
| | | | DLQAEEDKVNTLTKAKTKLEQQVD |
| | | | DLEGSLEQEKKLRMDLERAKRKLEG |
| | | | DLKLAQESIMDLENDKQQADEKIKK |
| | | | KEFETTQLLSKIEDEQSLGAQLQKKI |
| | | | KELQARIEELEEEIEAERAARAKVEK |
| | | | QRADLSRELEEISERLEEAGGATAAQ |
| | | | IEMNKKREAEFQKLRRDLEESTLQHE |
| | | | ATAAALRKKQADSVAELGEQIDNLQ |
| | | | RVKQKLEKEKSEYKMEIDDLSSNME |
| | | | AVAKAKGNLEKMCRTLEDQLSELKT |
| | | | KNDENVRQVNDISGQRARLLTENGE |
| | | | FGRQLEEKEALVSQLTRGKQAFTQQ |
| | | | VEELKRLIEEEVKAKNALAHGVQSA |
| | | | RHDCDLLREQFEEEQEAKAELQRGM |
| | | | SKANSEVAQWRTKYETDAIQRTEEL |
| | | | EEAKKKLAQRLQEAEETIEATNSKC |
| | | | ASLEKTKQRLQGEVEDLMIDVERAN |
| | | | ALAANLDKKQRNFDKVLAEWKQKY |
| | | | EEGQAELEGAQKEARSMSTELFKMK |
| | | | NSYEEALDHLETLKRENKNLQQEISD |
| | | | LTEQIGETGKSIHELEKAKKTVETEK |
| | | | SEIQTALEEAEGTLEHEESKILRVQLE |
| | | | LNQIKGEVDRKIAEKDEEMEQIKRNS |
| | | | QRVVDSMQSTLDSEVRSRNDALRVK |
| | | | KKMEGDLNEMEIQLSHSNRQAAEAQ |
| | | | KQLRNVQGQLKDAQLHLDDAVRAA |
| | | | EDMKEQAAMVERRNGLMVAEIEEL |
| | | | RVALEQTERGRKVAETELVDASERV |
| | | | GLLHSQNTSLLNTKKKLETDLVQVQ |
| | | | GEVDDIVQEARNAEEKAKKAITDAA |
| | | | MMAEELKKEQDTSSHLERMKKNLE |
| | | | VTVKDLQHRLDEAENLAMKGGKKQ |
| | | | LQKLESRVRELETEVEAEQRRGVDA |
| | | | VKGVRKYERRVKELTYQTEEDKKN |
| | | | VNRLQDLVDKLQMKVKAYKRQAEE |
| | | | AEEAANQHMSKFRKVQHELEEAEER |
| | | | ADIAETQVNKLRAKTRDSGKGKEAA |
| | | | E |
| SEQ ID | A0A1S3QIZ8 | Myosin heavy | MSTDAEMQIYGKAAIYLRKSEKERM |
| NO: 26 | (UniProtKB) | chain, fast | EAQAAPFDSKNSCYVADKVELYLKG |
| | | skeletal muscle- | LITARADGKCTVTVTKPDGTKEEGK |
| | | like/Salmo salar | EFKDADIYEMNPPKYDKIEDMAMM |
| | | | TYLNEASVLYNLKERYAAWMIYTYS |
| | | | GLFCATVNPYKWLPVYDAEVVNAY |
| | | | RGKKRMEAPPHIFSVSDNAFQFMLID |
| | | | KENQSVLITGESGAGKTVNTKRVIQY |
| | | | FATIAVSGGEKKKEVDPSKMQGSLE |
| | | | DQIIAANPLLEAYGNAKTVRNDNSSR |
| | | | FGKFIRIHFQGGKLAKADIETYLLEKS |
| | | | RVSFQLPDERGYHIFFQMMTGHKPEI |
| | | | VEMALITTNPYDFPMCSQGQIAVASI |
| | | | DDKEELDATDDAITILGFTNDEKIGIY |
| | | | KLTGAVVHHGNLKFKQKQREEQAE |
| | | | PDGTEVADKIGYLLGLNSAEMLKAL |
| | | | CYPRVKVGNEYVTKGQTVPQVNNS |
| | | | VMALAKSIYERMFLWMVIRINEMLD |
| | | | TKNPRQFYIGVLDIAGFEIFDYNSME |
| | | | QLCINFTNEKLQQFFNHTMFVLEQEE |
| | | | YKKEGIVWAFIDFGMDLAACIELIEK |
| | | | PLGIFSILEEECMFPKSSDTTFKDKLY |
| | | | SQHLGKTQAFEKPKPAKGKAEAHFS |
| | | | LVHYAGTVDYNITGWLEKNKDPLN |
| | | | DSVCQLYGKSGVKILAALYPAAPPE |
| | | | DTTKKGGKKKGGSMQTVSSQFRENL |
| | | | HKLMTNLRSTHPHFVRCLIPNESKTP |
| | | | GLMENFLVIHQLRCNGVLEGIRICRK |
| | | | GFPSRIIYADFKQRYKVLNASVIPEG |
| | | | QFMDNKKASEKLLGSIDVNHEDYKF |
| | | | GHTKVSQILYFKIKPLLQSAETEKEL |
| | | | ANMKENYEKMTADLAKALSTKKQ |
| | | | MEEKLVALMQEKNDLALQVAS |
| | A0JNJ5 | Myosin light | MAPKKDVKKPAAAAAPAPAPAPAP |
| | (UniProtKB) | chain 1/3, | APAPAPPKEEKIDLSAIKIEFSKQQQD |
| | | skeletal muscle | EFKEAFLLFDRTGECKITLSQVGDVL |
| | | isoform/Bos | RALGTNPTNAEVKKVLGNPSNEEMN |
| | | taurus | AKKIEFEQFLPMLQAISNNKDQGTYE |
| | | | DFVEGLRVFDKEGNGTVMGAELRH |
| | | | VLATLGEKMKEEEVEALMAGQEDS |
| | | | NGCINYEAFVKHIMSN |
| SEQ ID | P02604 | Myosin light | MAPKKDVKKPAAAAAPAPAPAPAP |
| NO: 27 | (UniProtKB) | chain 1, skeletal | APAPAKPKEPAIDLKSIKIEFSKEQQD |
| | | muscle | DFKEAFLLFDRTGDAKITLSQVGDIV |
| | | isoform/Gallus | RALGQNPTNAEINKILGNPSKEEMNA |
| | | gallus | KKITFEEFLPMLQAAANNKDQGTFE |
| | | | DFVEGLRVFDKEGNGTVMGAELRH |
| | | | VLATLGEKMTEEEVEELMKGQEDSN |
| | | | GCINYEAFVKHIMSV |
| SEQ ID | P02605 | Myosin light | MSFSPDEINDFKEAFLLFDRTGDAKI |
| NO: 28 | (UniProtKB) | chain 3, skeletal | TLSQVGDIVRALGQNPTNAEINKILG |
| | | muscle/Gallus | NPSKEEMNAKKITFEEFLPMLQAAA |
| | | gallus | NNKDQGTFEDFVEGLRVFDKEGNGT |
| | | | VMGAELRHVLATLGEKMTEEEVEEL |
| | | | MKGQEDSNGCINYEAFVKHIMSV |
| SEQ ID | B5DGT2 | Myosin light | MADAAPAEASGASAFTADQIEDFKE |
| NO: 29 | (UniProtKB) | chain 3, skeletal | AFGLFDRVGDSMIGYNQVADVMRA |
| | | muscle/Salmo | LGQNPQNKEVAAILGKPSADDMAN |
| | | salar | KRLAFADFMPMMEKVDKIVKGTLD |
| | | | DYVEGLRVFDKEGNGTVSGAELRIV |
| | | | LGTLGEKMSEAEIDSLLIGQEDENGSI |
| | | | NYEAFVKHVLSV |
| SEQ ID | P13538 | Myosin heavy | MASPDAEMAAFGEAAPYLRKSEKER |
| NO: 30 | (UniProtKB) | chain, skeletal | IEAQNKPFDAKSSVFVVHPKESFVKG |
| | | muscle, adult/ | TIQSKEGGKVTVKTEGGETLTVKED |
| | | Gallus gallus | QVFSMNPPKYDKIEDMAMMTHLHE |
| | | | PAVLYNLKERYAAWMIYTYSGLFCV |
| | | | TVNPYKWLPVYNPEVVLAYRGKKR |
| | | | QEAPPHIFSISDNAYQFMLTDRENQSI |
| | | | LITGESGAGKTVNTKRVIQYFATIAA |
| | | | SGEKKKEEQSGKMQGTLEDQIISANP |
| | | | LLEAFGNAKTVRNDNSSRFGKFIRIH |
| | | | FGATGKLASADIETYLLEKSRVTFQL |
| | | | PAERSYHIFYQIMSNKKPELIDMLLIT |
| | | | TNPYDYHYVSQGEITVPSIDDQEELM |
| | | | ATDSAIDILGFSADEKTAIYKLTGAV |
| | | | MHYGNLKFKQKQREEQAEPDGTEV |
| | | | ADKAAYLMGLNSAELLKALCYPRV |
| | | | KVGNEFVTKGQTVSQVHNSVGALA |
| | | | KAVYEKMFLWMVIRINQQLDTKQPR |
| | | | QYFIGVLDIAGFEIFDFNSFEQLCINFT |
| | | | NEKLQQFFNHHMFVLEQEEYKKEGI |
| | | | EWEFIDFGMDLAACIELIEKPMGIFSI |
| | | | LEEECMFPKATDTSFKNKLYDQHLG |
| | | | KSNNFQKPKPAKGKAEAHFSLVHYA |
| | | | GTVDYNISGWLEKNKDPLNETVIGL |
| | | | YQKSSVKTLALLFATYGGEAEGGGG |
| | | | KKGGKKKGSSFQTVSALFRENLNKL |
| | | | MANLRSTHPHFVRCIIPNETKTPGAM |
| | | | EHELVLHQLRCNGVLEGIRICRKGFP |
| | | | SRVLYADFKQRYRVLNASAIPEGQF |
| | | | MDSKKASEKLLGSIDVDHTQYRFGH |
| | | | TKVFFKAGLLGLLEEMRDDKLAEIIT |
| | | | RTQARCRGFLMRVEYRRMVERRESI |
| | | | FCIQYNVRSFMNVKHWPWMKLFFKI |
| | | | KPLLKSAESEKEMANMKEEFEKTKE |
| | | | ELAKSEAKRKELEEKMVVLLQEKND |
| | | | LQLQVQAEADSLADAEERCDQLIKT |
| | | | KIQLEAKIKEVTERAEDEEEINAELTA |
| | | | KKRKLEDECSELKKDIDDLELTLAK |
| | | | VEKEKHATENKVKNLTEEMAVLDE |
| | | | TIAKLTKEKKALQEAHQQTLDDLQV |
| | | | EEDKVNTLTKAKTKLEQQVDDLEGS |
| | | | LEQEKKLRMDLERAKRKLEGDLKLA |
| | | | HDSIMDLENDKQQLDEKLKKKDFEI |
| | | | SQIQSKIEDEQALGMQLQKKIKELQA |
| | | | RIEELEEEIEAERTSRAKAEKHRADLS |
| | | | RELEEISERLEEAGGATAAQIEMNKK |
| | | | REAEFQKMRRDLEEATLQHEATAAA |
| | | | LRKKHADSTAELGEQIDNLQRVKQK |
| | | | LEKEKSELKMEIDDLASNMESVSKA |
| | | | KANLEKMCRTLEDQLSEIKTKEEQN |
| | | | QRMINDLNTQRARLQTETGEYSRQA |
| | | | EEKDALISQLSRGKQGFTQQIEELKR |
| | | | HLEEEIKAKNALAHALQSARHDCEL |
| | | | LREQYEEEQEAKGELQRALSKANSE |
| | | | VAQWRTKYETDAIQRTEELEEAKKK |
| | | | LAQRLQDAEEHVEAVNAKCASLEKT |
| | | | KQRLQNEVEDLMVDVERSNAACAA |
| | | | LDKKQKNFDKILAEWKQKYEETQTE |
| | | | LEASQKESRSLSTELFKMKNAYEESL |
| | | | DHLETLKRENKNLQQEIADLTEQIAE |
| | | | GGKAVHELEKVKKHVEQEKSELQAS |
| | | | LEEAEASLEHEEGKILRLQLELNQIKS |
| | | | EIDRKIAEKDEEIDQLKRNHLRIVES |
| | | | MQSTLDAEIRSRNEALRLKKKMEGD |
| | | | LNEMEIQLSHANRMAAEAQKNLRNT |
| | | | QGTLKDTQIHLDDALRTQEDLKEQV |
| | | | AMVERRANLLQAEVEELRGALEQTE |
| | | | RSRKVAEQELLDATERVQLLHTQNT |
| | | | SLINTKKKLETDIVQIQSEMEDTIQEA |
| | | | RNAEEKAKKAITDAAMMAEELKKE |
| | | | QDTSAHLERMKKNMDQTVKDLHVR |
| | | | LDEAEQLALKGGKKQLQKLEARVRE |
| | | | LEGEVDSEQKRSAEAVKGVRKYERR |
| | | | VKELTYQCEEDRKNILRLQDLVDKL |
| | | | QMKVKSYKRQAEEAEELSNVNLSKF |
| | | | RKIQHELEEAEERADIAESQVNKLRV |
| | | | KSREIHGKKIEEEE |
| SEQ ID | Q8AXY6 | Muscle, skeletal | MRDLLVVPLGHVLTLAALSLAETLQ |
| NO: 31 | (UniProtKB) | receptor tyrosine | KAPFISTPLETVDALVEDVPKFVCVV |
| | | protein | ESYPEPEITWTRNSIPIRLFDTRYSIQR |
| | | kinase/Gallus | NGQLLTILSVEDSDDGVYCCTADNG |
| | | gallus | VGAAAQSCGALQVKMRPKITRPPVN |
| | | | VEIIEGLKAVLPCTTMGNPKPSVSWI |
| | | | KGETVVKENARIAVLDSGNLRIHNV |
| | | | QREDAGQYRCVAKNSLGSAYSKPAT |
| | | | VVVEVFARILKAPESQNITFGSMVTL |
| | | | RCTAAGAPVPTVTWLENGKAVSAGS |
| | | | IAESVKDRVVDSRLQVYVTRPGLFTC |
| | | | LATNKHSKTFGAAKAAATISVSEWS |
| | | | KLYKGDAGYCSTYRGEVCSAILSRN |
| | | | ALVFFNSSYADPEETQELLVHTAWT |
| | | | ELKTVSSFCQPAAESLLCNYIFQECK |
| | | | PSGVGPAPKPICRENCLAVKDLYCFK |
| | | | EWLSMEENSQRGIYKPGLMLLALPE |
| | | | CNRLPSLHQDPSACTHIPFFDFKKENI |
| | | | TRTCYSGNGQFYQGWANVTASGIPC |
| | | | QKWSDQAPHLHRRTPQVFPELSDAE |
| | | | NYCRNPGGENERPWCYTKDPSVTW |
| | | | EYCSVSPCGDASLSLGTRKPNGETQN |
| | | | LPPPPSYSPTYSMNVIILIISSFALIVIL |
| | | | GIITLVCCRRRKQWKNKKRESETPTL |
| | | | TTLPSELLLDRLHPNPMYQRMPLLLN |
| | | | PKLLSLEYPRNNIEYVRDIGEGAFGR |
| | | | VFQARAPGLLPYEPFTMVAVKMLKE |
| | | | EASADMQADFQREAALMAEFDNPNI |
| | | | VKLLGVCAVGKPMCLLFEYMAYGD |
| | | | LNEYLRDRSPRNLCSLVQGGLEARA |
| | | | CLLNPLALCCTSQLCIAKQVAAGMA |
| | | | YLSERKFVHRDLATRNCLVGENMV |
| | | | VKIADFGLSRNMYSADYYKANEND |
| | | | AIPIRWMPPESIFYNRYTTESDVWAY |
| | | | GVVLWEIFSYGMQPYYGMAHEEVIY |
| | | | YVRDGNILSCPDNCPLELYNLMRLC |
| | | | WSKLPADRPSFASIHRILERMYERAV |
| | | | ASPQV |
| SEQ ID | P02588 | Troponin C, | MASMTDQQAEARAFLSEEMIAEFKA |
| NO: 32 | (UniProtKB) | skeletal | AFDMFDADGGGDISTKELGTVMRM |
| | | muscle/Gallus | LGQNPTKEELDAIIEEVDEDGSGTIDF |
| | | gallus | EEFLVMMVRQMKEDAKGKSEEELA |
| | | | NCFRIFDKNADGFIDIEELGEILRATG |
| | | | EHVTEEDIEDLMKDSDKNNDGRIDF |
| | | | DEFLKMMEGVQ |
| SEQ ID | P02587 | Troponin C, | TDQQAEARSYLSEEMIAEFKAAFDM |
| NO: 33 | (UniProtKB) | skeletal | FDADGGGDISVKELGTVMRMLGQTP |
| | | muscle/Sus | TKEELDAIIEEVDEDGSGTIDFEEFLV |
| | | scrofa | MMVRQMKEDAKGKSEEELAECFRIF |
| | | | DRNMDGYIDAEELAEIFRASGEHVT |
| | | | DEEIESIMKDGDKNNDGRIDFDEFLK |
| | | | MMEGVQ |
| SEQ ID | P68246 | Troponin 1, fast | MSDEEKKRRAATARRQHLKSAMLQ |
| NO: 34 | (UniProtKB) | skeletal | LAVTEIEKEAAAKEVEKQNYLAEHC |
| | | muscle/Gallus | PPLSLPGSMQELQELCKKLHAKIDSV |
| | | gallus | DEERYDTEVKLQKTNKELEDLSQKL |
| | | | FDLRGKFKRPPLRRVRMSADAMLRA |
| | | | LLGSKHKVNMDLRANLKQVKKEDT |
| | | | EKEKDLRDVGDWRKNIEEKSGMEG |
| | | | RKKMFEAGES |
| SEQ ID | P68247 | Troponin 1, fast | MSDEEKKRRAATARRQHLKSAMLQ |
| NO: 35 | (UniProtKB) | skeletal | LAVTEIEKEAAAKEVEKQNYLAEHC |
| | | muscle/Cotumix | PPLSLPGSMQE |
| | | japonica | LQELCKKLHAKIDSVDEERYDTEVK |
| | | | LQKTNKELEDLSQKLFDLRGKFKRPP |
| | | | LRRVRMSAD |
| | | | AMLRALLGSKHKVNMDLRANLKQV |
| | | | KKEDTEKEKDLRDVGDWRKNIEEKS |
| | | | GMEGRKKMFEA |
| | | | GES |
| SEQ ID | Q8MKI3 | Troponin T, fast | MSDEEVEHVEEEYEEEEEAQEEAPPP |
| NO: 36 | (UniProtKB) | skeletal | PAEVPEVHEEVHEVHEPEEVQEEEKP |
| | | muscle/Bos | RPRLTAPKIPEGEKVDFDDIQKKRQN |
| | | taurus | KDLMELQALIDSHFEARKKEEEELV |
| | | | ALKERIEKRRAERAEQQRIRAEKERE |
| | | | RQNRLAEEKARREEEDAKRRAEDDL |
| | | | KKKKALSSMGANYSSYLAKADQKR |
| | | | GKKQTAREMKKKVLAERRKPLNIDH |
| | | | LSEDKLRDKAKELWDTLYQLETDKF |
| | | | EYGEKLKRQKYDITNLRSRIDQAQK |
| | | | HSKKAGTAPKGKVGGRWK |
| SEQ ID | Q75ZZ6 | Troponin T, | MSDAEEQEYEEEQPEEEEAAEEEEAP |
| NO: 37 | (UniProtKB) | slow skeletal | EEPEPVAEREEERPKPSRPVVPPLIPP |
| | | muscle/Sus | KIPEGERVDFDDIHRKRMEKDLLELQ |
| | | scrofa | TLIDVHFEQRKKEEEELVALKERIER |
| | | | RRAERAEQQRFRTEKERERQAKLAE |
| | | | EKMRKEEEEAKKRAEDDAKKKKVL |
| | | | SNMGAHFGGYLVKAEQKRGKRQTG |
| | | | REMKQRILSERKKPLNIDHMGEDQL |
| | | | REKAQELSDWIHQLESEKFDLMAKL |
| | | | KQQKYEINVLYNRISHAQKFRKGAG |
| | | | KGRVGGRWK |
| SEQ ID | NP_990105.1 | Tropomodulin- | MTSYRQELEKYRDIDEDKILQELSAE |
| NO: 38 | (NCBI) | 4/Gallus gallus | ELEQLDTELLEMDPENVLLPAGLRQ |
| | | | RDQTQKSPTGPLDREALLQHLEKQA |
| | | | LEAKEREDLVPFTGEKKGKPFVPKNP |
| | | | TREIPREEQITLEPELEEALANATEAE |
| | | | MCDIAAILGMYTLMSNKQYYDAICS |
| | | | GTITNTEGINSVVKPDKYKPVPDEPP |
| | | | NPTNVEETLRQIQANDSALEDVNLN |
| | | | NIKDIPISTLKAICEAMKTNTHVKKLS |
| | | | LVATRSNDPVATAVAEMLAENKTLQ |
| | | | SLNIESNFITSAGMMSVIKAMYQNST |
| | | | LSELKVDNQCQRLGNTVEMEMATM |
| | | | LEQCPSVVRFGYHFTQQGPRARAAI |
| | | | AITRNNELRRKQKKT |
| SEQ ID | P68139 | Alpha-actin- | MCDEDETTALVCDNGSGLVKAGFA |
| NO: 39 | (UniProtKB) | 1/Gallus gallus | GDDAPRAVFPSIVGRPRHQGVMVG |
| | | | MGQKDSYVGDEAQSKRGILTLKYPI |
| | | | EHGIITNWDDMEKIWHHTFYNELRV |
| | | | APEEHPTLLTEAPLNPKANREKMTQI |
| | | | MFETFNVPAMYVAIQAVLSLYASGR |
| | | | TTGIVLDSGDGVTHNVPIYEGYALPH |
| | | | AIMRLDLAGRDLTDYLMKILTERGY |
| | | | SFVTTAEREIVRDIKEKLCYVALDFE |
| | | | NEMATAASSSSEEKSYELPDGQVITI |
| | | | GNERFRCPETLFQPSFIGMESAGIHET |
| | | | TYNSIMKCDIDIRKDLYANNVMSGG |
| | | | TTMYPGIADRMQKEITALAPSTMKIK |
| | | | IIAPPERKYSVWIGGSILASLSTFQQM |
| | | | WITKQEYDEAGPSIVHRKCF |
| SEQ ID | P20111 | Alpha-actinin- | MNSMNQIETNMQYTYNYEEDEYMT |
| NO: 40 | (UniProtKB) | 2/Gallus gallus | QEEEWDRDLLLDPAWEKQQRKTFT |
| | | | AWCNSHLRKAGTQIENIEEDFRNGL |
| | | | KLMLLLEVISGERLPKPDRGKMRFH |
| | | | KIANVNKALDYIASKGVKLVSIGAEE |
| | | | IVDGNVKMTLGMIWTIILRFAIQDISV |
| | | | EETSAKEGLLLWCQRKTAPYRNVNI |
| | | | QNFHLSWKDGLGLCALIHRHRPDLI |
| | | | DYSKLNKDDPIGNINLAMEIAEKHLD |
| | | | IPKMLDAEDIVNTPKPDERAIMTYVS |
| | | | CFYHAFAGAEQAETAANRICKVLAV |
| | | | NQENERLMEEYERLASELLEWIRRTI |
| | | | PWLENRTPEKTMQAMQKKLEDFRD |
| | | | YRRKHKPPKVQEKCQLEINFNTLQT |
| | | | KLRISNRPAFMPSEGKMVSDIAGAW |
| | | | QRLEQAEKGYEEWLLNEIRRLERLE |
| | | | HLAEKFRQKASTHEQWAYGKEQILL |
| | | | QKDYESASLTEVRAMLRKHEAFESD |
| | | | LAAHQDRVEQIAAIAQELNELDYHD |
| | | | AASVNDRCQKICDQWDSLGTLTQKR |
| | | | REALERTEKLLETIDQLHLEFAKRAA |
| | | | PFNNWMEGAMEDLQDMFIVHSIEEI |
| | | | QSLISAHDQFKATLPEADGERQAILSI |
| | | | QNEVEKVIQSYSMRISASNPYSTVTV |
| | | | EEIRTKWEKVKQLVPQRDQSLQEEL |
| | | | ARQHANERLRRQFAAQANVIGPWIQ |
| | | | TKMEEIARSSIEMTGPLEDQMNQLK |
| | | | QYEQNIINYKHNIDKLEGDHQLIQEA |
| | | | LVFDNKHTNYTMEHIRVGWELLLTT |
| | | | IARTINEVETQILTRDAKGITQEQMN |
| | | | DFRASFNHFDRRKNGLMDHDDFRA |
| | | | CLISMGYDLGEAEFARIMSLVDPNG |
| | | | QGTVTFQSFIDFMTRETADTDTAEQV |
| | | | IASFRILASDKPYILADELRRELPPEQ |
| | | | AQYCIKRMPQYTGPGSVPGALDYTS |
| | | | FSSALYGESDL |
| SEQ ID | P20111-2 | Alpha-actinin- | MNSMNQIETNMQYTYNYEEDEYMT |
| NO: 41 | (UniProtKB) | 2/Gallus gallus | QEEEWDRDLLLDPAWEKQQRKTFT |
| | | | AWCNSHLRKAGTQIENIEEDFRNGL |
| | | | KLMLLLEVISGERLPKPDRGKMRFH |
| | | | KIANVNKALDYIASKGVKLVSIGAEE |
| | | | IVDGNVKMTLGMIWTIILRFAIQDISV |
| | | | EETSAKEGLLLWCQRKTAPYRNVNI |
| | | | QNFHLSWKDGLGLCALIHRHRPDLI |
| | | | DYSKLNKDDPIGNINLAMEIAEKHLD |
| | | | IPKMLDAEDIVNTPKPDERAIMTYVS |
| | | | CFYHAFAGAEQAETAANRICKVLAV |
| | | | NQENERLMEEYERLASELLEWIRRTI |
| | | | PWLENRTPEKTMQAMQKKLEDFRD |
| | | | YRRKHKPPKVQEKCQLEINFNTLQT |
| | | | KLRISNRPAFMPSEGKMVSDIAGAW |
| | | | QRLEQAEKGYEEWLLNEIRRLERLE |
| | | | HLAEKFRQKASTHEQWAYGKEQILL |
| | | | QKDYESASLTEVRAMLRKHEAFESD |
| | | | LAAHQDRVEQIAAIAQELNELDYHD |
| | | | AASVNDRCQKICDQWDSLGTLTQKR |
| | | | REALERTEKLLETIDQLHLEFAKRAA |
| | | | PFNNWMEGAMEDLQDMFIVHSIEEI |
| | | | QSLISAHDQFKATLPEADGERQAILSI |
| | | | QNEVEKVIQSYSMRISASNPYSTVTV |
| | | | EEIRTKWEKVKQLVPQRDQSLQEEL |
| | | | ARQHANERLRRQFAAQANVIGPWIQ |
| | | | TKMEEIARSSIEMTGPLEDQMNQLK |
| | | | QYEQNIINYKHNIDKLEGDHQLIQEA |
| | | | LVFDNKHTNYTMEHIRVGWELLLTT |
| | | | IARTINEVETQILTRDAKGITQEQMN |
| | | | DFRASFNHFDRRKNGLMDHDDFRA |
| | | | CLISMGYDLDESDNLHSDEFKACLIS |
| | | | LGEVGNDLQGEAEFARIMSLVDPNG |
| | | | QGTVTFQSFIDFMTRETADTDTAEQV |
| | | | IASFRILASDKPYILADELRRELPPEQ |
| | | | AQYCIKRMPQYTGPGSVPGALDYTS |
| | | | FSSALYGESDL |
| SEQ ID | P13127 | F-actin-capping | MADFEDRVSDEEKVRIAAKFITHAPP |
| NO: 42 | (UniProtKB) | protein subunit | GEFNEVFNDVRLLLNNDNLLREGAA |
| | | alpha-1/Gallus | HAFAQYNMDQFTPVKIEGYDDQVLI |
| | | gallus | TEHGDLGNGRFLDPRNKISFKFDHLR |
| | | | KEASDPQPEDTESALKQWRDACDSA |
| | | | LRAYVKDHYPNGFCTVYGKSIDGQQ |
| | | | TIIACIESHQFQPKNFWNGRWRSEWK |
| | | | FTITPPTAQVAAVLKIQVHYYEDGNV |
| | | | QLVSHKDIQDSVQVSSDVQTAKEFIK |
| | | | IIENAENEYQTAISENYQTMSDTTFK |
| | | | ALRRQLPVTRTKIDWNKILSYKIGKE |
| | | | MQNA |
| SEQ ID | P28497 | F-actin-capping | MADLEEQLSDEEKVRIAAKFIIHAPP |
| NO: 43 | (UniProtKB) | protein subunit | GEFNEVFNDVRLLLNNDNLLREGAA |
| | | alpha-2/Gallus | HAFAQYNLDQFTPVKIDGYDEQVLIT |
| | | gallus | EHGDLGNGKFLDPKNKISFKFDHLR |
| | | | KEATDPRPHEVENAIESWRNSVETA |
| | | | MKAYVKEHYPNGVCTVYGKTIDGQ |
| | | | QTIIACIESHQFQAKNFWNGRWRSE |
| | | | WKFTISPSTTQVAGILKIQVHYYEDG |
| | | | NVQLVSHKDIQDSLTVSNEAQTAKE |
| | | | FIKIVEAAENEYQTAISENYQTMSDT |
| | | | TFKALRRQLPVTRTKIDWNKILSYKI |
| | | | GKEMQNA |
| SEQ ID | A0M8U0 | Capping protein | MADLEEQLSDEEKVRIAAKFIIHAPP |
| NO: 44 | (UniProtKB) | (Actin filament) | GEFNEVFNDVRLLLNNDNLLREGAA |
| | | muscle Z-line, | HAFAQYNLDQFTPVKIDGYDEQVLIT |
| | | alpha 2/Gallus | EHGDLGNGKFLDPKNKISFKFDHLR |
| | | gallus | KEATDPRPHEVENAIESWRNSVETA |
| | | | MKAYVKEHYPNGVCTVYGKTIDGQ |
| | | | QTIIACIESHQFQAKNFWNGRWRSE |
| | | | WKFTISPSTTQVAGILKIQVHYYEDG |
| | | | NVQLVSHKDIQDSLTVSNEAQTAKE |
| | | | FIKIVEAAENEYQTAISENYQTMSDT |
| | | | TFKALRRQLPVTRTKIDWNKILSYKI |
| | | | GKEMQNA |
| SEQ ID | NP_001265047.1 | F-actin-capping | MSVGQGLCESEKVSLICGLMRQSPP |
| NO: 45 | (NCBI) | protein subunit | GEFRQVVQDLCDLLQDDELVKQQA |
| | | alpha-3/Gallus | ARAGARHNKNNFTPVLVNGNTVLLT |
| | | gallus | QYNDLGGNRFFYPQDKFSFEFDHLS |
| | | | GVTSKTHLHRVMLDEGELWRGALH |
| | | | KGLNAYVNYHFPVGNCCVFKKSLG |
| | | | KRQMLVACIEAHQYQPSKHWNSLW |
| | | | KSDWTFSLTPVMTRVTGIFLLQLHYF |
| | | | RNANLHVTISKSVSESLHVIDRNQFV |
| | | | TDFVKFVKTEDNKIHNAILENIQALS |
| | | | EHTWRKNLRRRLPITRTFMNWNELL |
| | | | NNQHLKTGVSRKEVPP |
| SEQ ID | P02565 | Myosin-1B/ | MATDADMAIFGEAAPYLRKSEKERI |
| NO: 46 | (UniProtKB) | Gallus gallus | EAQNKPFDAKSSVFWHAKESYVKS |
| | | | TIQSKESGKVTVKTEGGETLTVKEDQ |
| | | | IFSMNPPKYDKIEDMAMMTHLHEPA |
| | | | VLYNLKERYAAWMIYTYSGLFCVTV |
| | | | NPYKWLPVYNPEVVLAYRGKKRQE |
| | | | APPHIFSISDNAYQFMLTDRENQSILI |
| | | | TGESGAGKTVNTKRVIQYFATIAASG |
| | | | DKKKEEQPAGKMQGTLEDQIISANP |
| | | | LLEAFGNAKTVRNDNSSRFGKFIRIH |
| | | | FGATGKLASADIETYLLEKSRVTFQL |
| | | | KAERSYHIFYQIMSNKKPELIEMLLIT |
| | | | TNPYDYQYVSQGEITVPSINDQEELM |
| | | | ATDSAIDILGFTPDEKTAIYKLTGAV |
| | | | MHYGNLKFKQKQREEQAEPGGTEV |
| | | | ADKAAYLMGLNSADLLKALCYPRV |
| | | | KVGNEYVTKGQTVQQVYNSVGALA |
| | | | KSVFEKMFLWMVVRINQQLDTKQP |
| | | | RQYFIGVLDIAGFEIFDFNSLEQLCIN |
| | | | FTNEKLQQFFNHHMFVLEQEEYKKE |
| | | | GIEWEFIDFGMDLAACIELIEKPMGIF |
| | | | SILEEECMFPKATDTSFKNKLYDQHL |
| | | | GKSNNFQKPKPGKGKAEAHFSLVHY |
| | | | AGTVDYNITGWLEKNKDPLNETVVG |
| | | | LYQKSSLKTLALLFASVGGAEAESG |
| | | | AGGKKGGKKKGSSFQTVSALFRENL |
| | | | NKLMSNLRSTHPHFVRCLIPNETKTP |
| | | | GAMEHELVLHQLRCNGVLEGIRICR |
| | | | KGFPIRILYADFKQRYKVLNASAIPE |
| | | | GQFIDSKKASEKLLGSIDVDHTQYKF |
| | | | GHTKVFFKAGLLGLLEEMRDEKLAQ |
| | | | LITRTQARCRGFLMRVEFKKMMERR |
| | | | ESIFCIQYNVRAFMNVKHWPWMKLF |
| | | | FKIKPLLKSAESEKEMANMKEEFEKT |
| | | | KEELAKSEAKRKELEEKMVSLLQEK |
| | | | NDLQLQVQAEADGLADAEERCDQLI |
| | | | KTKIQLEAKIKELTERAEDEEEMNAE |
| | | | LTAKKRKLEDECSELKKDIDDLELTL |
| | | | AKVEKEKHATENKVKNLTEEMAAL |
| | | | DETIAKLTKEKKALQEAHQQTLDDL |
| | | | QAEEDKVNTLTKAKTKLEQQVDDLE |
| | | | GSLEQEKKLRMDLERAKRKLEGDLK |
| | | | MTQESTMDLENDKQQLDEKLKKKD |
| | | | FEISQIQSKIEDEQALGMQLQKKIKEL |
| | | | QARIEELEEEIEAERTSRAKAEKHRA |
| | | | DLSRELEEISERLEEAGGATAAQIDM |
| | | | NKKREAEFQKMRRDLEEATLQHEAT |
| | | | AAALRKKHADSTADVGEQIDNLQRV |
| | | | KQKLEKEKSELKMEIDDLASNMESV |
| | | | SKAKANLEKMCRSLEDQLSEIKTKEE |
| | | | EQQRTINDISAQKARLQTESGEYSRQ |
| | | | VEEKDALISQLSRGKQAFTQQIEELK |
| | | | RHLEEEIKAKKCPAHALQSARHDCD |
| | | | LLREQYEEEQEAKGELQRALSKANS |
| | | | EVAQWRTKYETDAIQRTEELEEAKK |
| | | | KLAQRLQDAEEHVEAVNSKCASLEK |
| | | | TKQRLQNEVEDLMIDVERSNAACAA |
| | | | LDKKQKNFDKILSEWKQKYEETQAE |
| | | | LEASQKESRSLSTELFKMKNAYEESL |
| | | | DHLETLKRENKNLQQEISDLTEQIAE |
| | | | GGKAIHELEKVKKQIEQEKSELQTAL |
| | | | EEAEASLEHEEGKILRVQLELNQVKS |
| | | | DIDRKIAEKDEEIDQLKRNHLRVVDS |
| | | | MQSTLDAEIRSRNEALRLKKKMEGD |
| | | | LNEIEIQLSHANRQAAEAQKNLRNTQ |
| | | | GVLKDTQIHLDDALRSQEDLKEQVA |
| | | | MVERRANLLQAEIEELRAALEQTERS |
| | | | RKVAEQELLDASERVQLLHTQNTSLI |
| | | | NTKKKLESDISQIQSEMEDTIQEARN |
| | | | AEEKAKKAITDAAMMAEELKKEQD |
| | | | TSAHLERMKKNLDQTVKDLQHRLD |
| | | | EAEQLALKGGKKQIQKLEARVRELE |
| | | | GEVDAEQKRSAEAVKGVRKYERRV |
| | | | KELTYQSEEDRKNVLRLQDLVDKLQ |
| | | | MKVKSYKRQAEEAEELSNVNLSKFR |
| | | | KIQHELEEAEERADIAESQVNKLRAK |
| | | | SREIGKKAESEE |
| SEQ ID | Q9TV63 | Myosin-2/Sus | MSSDQEMAIFGEAAPYLRKSEKERIE |
| NO: 47 | (UniProtKB) | scrofa | AQNRPFDAKTSVFVAEPKESFVKGTI |
| | | | QSREGGKVTVKTEAGATLTVKEDQV |
| | | | FPMNPPKFDKIEDMAMMTHLHEPGV |
| | | | LYNLKERYAAWMIYTYSGLFCVTVN |
| | | | PYKWLPVYNPEVVTAYRGKKRQEA |
| | | | PPHIFSISDNAYQFMLTDRENQSILIT |
| | | | GESGAGKTVNTKRVIQYFATIAVTGE |
| | | | KKKEEPTSGKMQGTLEDQIISANPLL |
| | | | EAFGNAKTVRNDNSSRFGKFIRIHFG |
| | | | TTGKLASADIETYLLEKSRVTFQLKA |
| | | | ERSYHIFYQITSNRKPELIEMLLITTNP |
| | | | YDYPFISQGEISVASIDDQEELIATDS |
| | | | AIDILGFTNEEKVSIYKLTGAVMHYG |
| | | | NLKFKQKQREEQAEPDGTEVADKA |
| | | | AYLQSLNSADLLKALCYPRVKVGNE |
| | | | YVTKGQTVEQVTNAVGALAKAVYE |
| | | | KMFLWMVTRINQQLDTKQPRQYFIG |
| | | | VLDIAGFEIFDFNSLEQLCINFTNEKL |
| | | | QQFFNHHMFVLEQEEYKREGIEWTFI |
| | | | DFGMDLAACIELIEKPMGIFSILEEEC |
| | | | MFPKATDTSFKNKLYEQHLGKSANF |
| | | | QKPKPAKGKVEAHFSLIHYAGTVDY |
| | | | NITGWLDKNKDPLNDTVVGLYQKS |
| | | | ALKTLAFLFSGAQTGEAEAGGTKKG |
| | | | GKKKGSSFQTVSALFRENLNKLMTN |
| | | | LRSTHPHFVRCIIPNETKTPGAMEHE |
| | | | LVLHQLRCNGVLEGIRICRKGFPSRIL |
| | | | YADFKQRYKVLNASAIPEGQYIDSK |
| | | | KASEKLLASIDIDHTQYKFGHTKVFF |
| | | | KAGLLGLLEEMRDDKLAQLITRTQA |
| | | | RCRGFLARVEYQKMVERRESIFCIQY |
| | | | NIRAFMNVKHWPWMKLFFKIKPLLK |
| | | | SAESEKEMATMKEEFQKTKDELAKS |
| | | | EAKRKELEEKMVTLLKEKNDLQLQV |
| | | | QAEAEGLADAEERCDQLIKTKIQLEA |
| | | | KIKEVTERAEDEEEINAELTAKKRKL |
| | | | EDECSELKKDIDDLELTLAKVEKEKH |
| | | | ATENKVKNLTEEMAGLDETIAKLTK |
| | | | EKKALQEAHQQTLDDLQAEEDKVN |
| | | | TLTKAKTKLEQQVDDLEGSLEQEKK |
| | | | LRMDLERAKRKLEGDLKLAQESIMD |
| | | | IENEKQQLDEKLKKKEFEISNLQSKIE |
| | | | DEQALAIQLQKKIKELQARIEELEEEI |
| | | | EAERASRAKAEKQRSDLSRELEEISE |
| | | | RLEEAGGATSAQIEMNKKREAEFQK |
| | | | MRRDLEEATLQHEATAAALRKKHA |
| | | | DSVAELGEQIDNLQRVKQKLEKEKS |
| | | | EMKMEIDDLASNMETVSKAKGNLE |
| | | | KMCRTLEDQLSELKSKEEEQQRLIND |
| | | | LTAQRGRLQTESGEFSRQLDEKEAL |
| | | | VSQLSRGKQAYTQQIEELKRQLEEEI |
| | | | KAKNALAHALQSSRHDCDLLREQYE |
| | | | EEQESKAELQRALSKANTEVAQWRT |
| | | | KYETDAIQRTEELEEAKKKLAQRLQ |
| | | | AAEEHVEAVNAKCASLEKTKQRLQ |
| | | | NEVEDLMLDVERTNAACAALDKKQ |
| | | | RNFDKILAEWKQKYEETHAELEASQ |
| | | | KEARSLGTELFKMKNAYEESLDQLE |
| | | | TLKRENKNLQQEISDLTEQIAEGGKR |
| | | | IHELEKIKKQVEQEKSEIQAALEEAE |
| | | | ASLEHEEGKILRIQLELNQVKSEVDR |
| | | | KIAEKDEEIDQLKRNHVRVVESMQS |
| | | | MLDAEIRSRNDAIRLKKKMEGDLNE |
| | | | MEIQLNHANRMAAEALRNYRNTQGI |
| | | | LKDTQIHLDDALRGQEDLKEQLAMV |
| | | | ERRANLLQAEIEELRATLEQTERSRK |
| | | | VAEQELLDASERVQLLHTQNTSLINT |
| | | | KKKLETDISQMQGEMEDILQEARNA |
| | | | EEKAKKAITDAAMMAEELKKEQDTS |
| | | | AHLERMKKNMEQTVKDLQHRLDEA |
| | | | EQLALKGGKKQIQKLEARVRELEGE |
| | | | VESEQKRNAEAVKGLRKHERRVKEL |
| | | | TYQTEEDRKNILRLQDLVDKLQAKV |
| | | | KSYKRQAEEAEEQSNTNLSKFRKLQ |
| | | | HELEEAEERADIAESQVNKLRVKSRE |
| | | | VHTKVISEE |
| SEQ ID | Q9TV62 | Myosin-4/Sus | MSSDQEMAIFGEAAPYLRKSEKERIE |
| NO: 48 | (UniProtKB) | scrofa | AQNKPFDAKTSVFVAEPKESFVKGT |
| | | | VQSREGGKVTVKTEAGATLTVKEDQ |
| | | | VFPMNPPKFDKIEDMAMMTHLHEPA |
| | | | VLYNLKERYAAWMIYTYSGLFCVTV |
| | | | NPYKWLPVYNAEVVTAYRGKKRQE |
| | | | APPHIFSISDNAYQFMLTDRENQSILI |
| | | | TGESGAGKTVNTKRVIQYFATIAVTG |
| | | | EKKKEEPTPGKMQGTLEDQIISANPL |
| | | | LEAFGNAKTVRNDNSSRFGKFIRIHF |
| | | | GTTGKLASADIETYLLEKSRVTFQLK |
| | | | AERSYHIFYQIMSNKKPELIEMLLITT |
| | | | NPYDYAFVSQGEITVPSIDDQEELMA |
| | | | TDSAIEILGFTSDERVSIYKLTGAVM |
| | | | HYGNLKFKQKQREEQAEPDGTEVA |
| | | | DKAAYLQGLNSADLLKALCYPRVK |
| | | | VGNEFVTKGQTVQQVYNAVGALAK |
| | | | AVYDKMFLWMVTRINQQLDTKQPR |
| | | | QYFIGVLDIAGFEIFDFNSLEQLCINFT |
| | | | NEKLQQFFNHHMFVLEQEEYKKEGI |
| | | | EWEFIDFGMDLAACIELIEKPMGIFSI |
| | | | LEEECMFPKATDTSFKNKLYEQHLG |
| | | | KSNNFQKPKPAKGKAEAHFSLIHYA |
| | | | GTVDYNITGWLDKNKDPLNETVVGL |
| | | | YQKSSVKTLAFLFAERQSSEEGGTKK |
| | | | GGKKKGSSFQTVSALFRENLNKLMT |
| | | | NLRSTHPHFVRCIIPNETKTPGAMEH |
| | | | ELVLHQLRCNGVLEGIRICRKGFPSRI |
| | | | LYADFKQRYKVLNASAIPEGQFIDSK |
| | | | KASEKLLGSIDIDHTQYKFGHTKVFF |
| | | | KAGLLGTLEEMRDEKLAQLITRTQA |
| | | | MCRGFLMRVEFRKMMERRESIFCIQ |
| | | | YNIRAFMNVKHWPWMKLYFKIKPL |
| | | | LKSAETEKEMANMKEEFEKTKEDLA |
| | | | KSEAKRKELEEKMVALMQEKNDLQ |
| | | | LQVQAEADGLADAEERCDQLIKTKI |
| | | | QLEAKIKEVTERAEDEEEINAELTAK |
| | | | KRKLEDECSELKKDIDDLELTLAKVE |
| | | | KEKHATENKVKNLTEEMAGLDENIA |
| | | | KLTKEKKALQEAHQQTLDDLQAEED |
| | | | KVNTLTKAKTKLEQQVDDLEGSLEQ |
| | | | EKKLRMDLERAKRKLEGDLKLAQES |
| | | | TMDIENDKQQLDEKLKKKEFEMSNL |
| | | | QSKIEDEQALAMQLQKKIKELQART |
| | | | EELEEEIEAERASRAKAEKQRSDLSR |
| | | | ELEEISERLEEAGGATSAQIEMNKKR |
| | | | EAEFQKMRRDLEEATLQHEATAAAL |
| | | | RKKHADSVAELGEQIDNLQRVKQKL |
| | | | EKEKSELKMEIDDLASNMETVSKAK |
| | | | GNLEKMCRTLEDQLSEVKTKEEEHQ |
| | | | RLINELSAQKARLQTESGEFSRQLDE |
| | | | KEALVSQLSRGKQAFTQQIEELKRQL |
| | | | EEETKAKSALAHAVQSSRHDCDLLR |
| | | | EQYEEEQEAKAELQRAMSKANSEVA |
| | | | QWRTKYETDAIQRTEELEEAKKKLA |
| | | | QRLQDAEEHVEAVNAKCASLEKTK |
| | | | QRLQNEVEDLMLDVERSNAACAAL |
| | | | DKKQRNFDKILAEWKHKYEETQAEL |
| | | | EASQKESRSLSTELFKVKNAYEESLD |
| | | | QLETLKRENKNLQQEISDLTEQIAEG |
| | | | GKHIHELEKVKKQIEQEKSELQAALE |
| | | | EAEASLEHEEGKILRIQLELNQVKSEI |
| | | | DRKIAEKDEEIDQMKRNHIRVVESM |
| | | | QSTLDAEIRSRNDALRIKKKMEGDL |
| | | | NEMEIQLNHANRQATEAIRNLRNTQ |
| | | | GVLKDTQLHLDDAIRGQDDLKEQLA |
| | | | MVERRANLMQAEIEELRASLEQTER |
| | | | SRRVAEQELLDASERVQLLHTQNTS |
| | | | LINTKKKLETDISQIQGEMEDIVQEA |
| | | | RNAEEKAKKAITDAAMMAEELKKE |
| | | | QDTSAHLERMKKNMEQTVKDLQHR |
| | | | LDEAEQLALKGGKKQIQKLEARVRE |
| | | | LENEVENEQKRNVEAVKGLRKHERR |
| | | | VKELTYQTEEDRKNVLRLQDLVDKL |
| | | | QSKVKAYKRQAEEAEEQSNVNLSKF |
| | | | RKLQHELEEAEERADIAESQVNKLR |
| | | | VKSREVHTKVISEE |
| SEQ ID | P02565 | Myosin-1B/ | MATDADMAIFGEAAPYLRKSEKERI |
| NO: 49 | (UniProtKB) | Gallus gallus | EAQNKPFDAKSSVFWHAKESYVKS |
| | | | TIQSKESGhKVTVKTEGGETLTVKED |
| | | | QIFSMNPPKYDKIEDMAMMTHLHEP |
| | | | AVLYNLKERYAAWMIYTYSGLFCVT |
| | | | VNPYKWLPVYNPEVVLAYRGKKRQ |
| | | | EAPPHIFSISDNAYQFMLTDRENQSIL |
| | | | ITGESGAGKTVNTKRVIQYFATIAAS |
| | | | GDKKKEEQPAGKMQGTLEDQIISAN |
| | | | PLLEAFGNAKTVRNDNSSRFGKFIRI |
| | | | HFGATGKLASADIETYLLEKSRVTFQ |
| | | | LKAERSYHIFYQIMSNKKPELIEMLLI |
| | | | TTNPYDYQYVSQGEITVPSINDQEEL |
| | | | MATDSAIDILGFTPDEKTAIYKLTGA |
| | | | VMHYGNLKFKQKQREEQAEPGGTE |
| | | | VADKAAYLMGLNSADLLKALCYPR |
| | | | VKVGNEYVTKGQTVQQVYNSVGAL |
| | | | AKSVFEKMFLWMVVRINQQLDTKQ |
| | | | PRQYFIGVLDIAGFEIFDFNSLEQLCI |
| | | | NFTNEKLQQFFNHHMFVLEQEEYKK |
| | | | EGIEWEFIDFGMDLAACIELIEKPMGI |
| | | | FSILEEECMFPKATDTSFKNKLYDQH |
| | | | LGKSNNFQKPKPGKGKAEAHFSLVH |
| | | | YAGTVDYNITGWLEKNKDPLNETVV |
| | | | GLYQKSSLKTLALLFASVGGAEAES |
| | | | GAGGKKGGKKKGSSFQTVSALFREN |
| | | | LNKLMSNLRSTHPHFVRCLIPNETKT |
| | | | PGAMEHELVLHQLRCNGVLEGIRICR |
| | | | KGFPIRILYADFKQRYKVLNASAIPE |
| | | | GQFIDSKKASEKLLGSIDVDHTQYKF |
| | | | GHTKVFFKAGLLGLLEEMRDEKLAQ |
| | | | LITRTQARCRGFLMRVEFKKMMERR |
| | | | ESIFCIQYNVRAFMNVKHWPWMKLF |
| | | | FKIKPLLKSAESEKEMANMKEEFEKT |
| | | | KEELAKSEAKRKELEEKMVSLLQEK |
| | | | NDLQLQVQAEADGLADAEERCDQLI |
| | | | KTKIQLEAKIKELTERAEDEEEMNAE |
| | | | LTAKKRKLEDECSELKKDIDDLELTL |
| | | | AKVEKEKHATENKVKNLTEEMAAL |
| | | | DETIAKLTKEKKALQEAHQQTLDDL |
| | | | QAEEDKVNTLTKAKTKLEQQVDDLE |
| | | | GSLEQEKKLRMDLERAKRKLEGDLK |
| | | | MTQESTMDLENDKQQLDEKLKKKD |
| | | | FEISQIQSKIEDEQALGMQLQKKIKEL |
| | | | QARIEELEEEIEAERTSRAKAEKHRA |
| | | | DLSRELEEISERLEEAGGATAAQIDM |
| | | | NKKREAEFQKMRRDLEEATLQHEAT |
| | | | AAALRKKHADSTADVGEQIDNLQRV |
| | | | KQKLEKEKSELKMEIDDLASNMESV |
| | | | SKAKANLEKMCRSLEDQLSEIKTKEE |
| | | | EQQRTINDISAQKARLQTESGEYSRQ |
| | | | VEEKDALISQLSRGKQAFTQQIEELK |
| | | | RHLEEEIKAKKCPAHALQSARHDCD |
| | | | LLREQYEEEQEAKGELQRALSKANS |
| | | | EVAQWRTKYETDAIQRTEELEEAKK |
| | | | KLAQRLQDAEEHVEAVNSKCASLEK |
| | | | TKQRLQNEVEDLMIDVERSNAACAA |
| | | | LDKKQKNFDKILSEWKQKYEETQAE |
| | | | LEASQKESRSLSTELFKMKNAYEESL |
| | | | DHLETLKRENKNLQQEISDLTEQIAE |
| | | | GGKAIHELEKVKKQIEQEKSELQTAL |
| | | | EEAEASLEHEEGKILRVQLELNQVKS |
| | | | DIDRKIAEKDEEIDQLKRNHLRVVDS |
| | | | MQSTLDAEIRSRNEALRLKKKMEGD |
| | | | LNEIEIQLSHANRQAAEAQKNLRNTQ |
| | | | GVLKDTQIHLDDALRSQEDLKEQVA |
| | | | MVERRANLLQAEIEELRAALEQTERS |
| | | | RKVAEQELLDASERVQLLHTQNTSLI |
| | | | NTKKKLESDISQIQSEMEDTIQEARN |
| | | | AEEKAKKAITDAAMMAEELKKEQD |
| | | | TSAHLERMKKNLDQTVKDLQHRLD |
| | | | EAEQLALKGGKKQIQKLEARVRELE |
| | | | GEVDAEQKRSAEAVKGVRKYERRV |
| | | | KELTYQSEEDRKNVLRLQDLVDKLQ |
| | | | MKVKSYKRQAEEAEELSNVNLSKFR |
| | | | KIQHELEEAEERADIAESQVNKLRAK |
| | | | SREIGKKAESEE |
| SEQ ID | Q9TV61 | Myosin-1/Sus | MSSDQEMAIFGEAAPYLRKSEKERIE |
| NO: 50 | (UniProtKB) | scrofa | AQNKPFDAKTSVFVAEPKESFVKGT |
| | | | VQSREGGKVTVKTEAGATLTVKEDQ |
| | | | VFPMNPPKFDKIEDMAMMTHLHEPA |
| | | | VLYNLKERYAAWMIYTYSGLFCVTV |
| | | | NPYKWLPVYNAEVVTAYRGKKRQE |
| | | | APPHIFSISDNAYQFMLTDRENQSILI |
| | | | TGESGAGKTVNTKRVIQYFATIAVTG |
| | | | EKKKEEPTSGKMQGTLEDQIISANPL |
| | | | LEAFGNAKTVRNDNSSRFGKFIRIHF |
| | | | GTTGKLASADIETYLLEKSRVTFQLK |
| | | | AERSYHIFYQIMSNKKPELIEMLLITT |
| | | | NPYDYAFVSQGEITVPSIDDQEELMA |
| | | | TDSAIEILGFTSDERVSIYKLTGAVM |
| | | | HYGNLKFKQKQREEQAEPDGTEVA |
| | | | DKAAYLQGLNSADLLKALCYPRVK |
| | | | VGNEFVTKGQTVQQVYNAVGALAK |
| | | | AVYDKMFLWMVTRINQQLDTKQPR |
| | | | QYFIGVLDIAGFEIFDFNSLEQLCINFT |
| | | | NEKLQQFFNHHMFVLEQEEYKKEGI |
| | | | EWEFIDFGMDLAACIELIEKPMGIFSI |
| | | | LEEECMFPKATDTSFKNKLYEQHLG |
| | | | KSNNFQKPKPAKGKVEAHFSLIHYA |
| | | | GTVDYNITGWLDKNKDPLNETVVGL |
| | | | YQKSSVKTLAFLFTGAAGADAEAGG |
| | | | GKKGGKKKGSSFQTVSALFRENLNK |
| | | | LMTNLRSTHPHFVRCIIPNETKTPGA |
| | | | MEHELVLHQLRCNGVLEGIRICRKGF |
| | | | PSRILYADFKQRYKVLNASAIPEGQFI |
| | | | DSKKASEKLLGSIDIDHTQYKFGHTK |
| | | | VFFKAGLLGLLEEMRDEKLAQLITRT |
| | | | QARCRGFLARVEYQKMVERRESIFCI |
| | | | QYNIRAFMNVKHWPWMKLYFKIKP |
| | | | LLKSAETEKEMANMKEEFEKTKESL |
| | | | AKAEAKRKELEEKMVALMQEKNDL |
| | | | QLQVQAEADSLADAEERCDQLIKTKI |
| | | | QLEAKIKEVTERAEDEEEINAELTAK |
| | | | KRKLEDECSELKKDIDDLELTLAKVE |
| | | | KEKHATENKVKNLTEEMAGLDETIA |
| | | | KLTKEKKALQEAHQQTLDDLQAEED |
| | | | KVNTLTKAKTKLEQQVDDLEGSLEQ |
| | | | EKKLRMDLERAKRKLEGDLKLAQES |
| | | | TMDIENDKQQLDEKLKKKEFEMSNL |
| | | | QSKIEDEQALAMQLQKKIKELQARIE |
| | | | ELEEEIEAERASRAKAEKQRSDLSRE |
| | | | LEEISERLEEAGGATSAQIEMNKKRE |
| | | | AEFQKMRRDLEEATLQHEATAATLR |
| | | | KKHADSVAELGEQIDNLQRVKQKLE |
| | | | KEKSEMKMEIDDLASNMETVSKAK |
| | | | GNLEKMCRTLEDQLSELKTKEEEQQ |
| | | | RLINDLTAQRARLQTESGEYSRQLDE |
| | | | KDTLVSQLSRGKQAFTQQIEELKRQL |
| | | | EEEIKAKSALAHAVQSSRHDCDLLRE |
| | | | QYEEEQEAKAELQRAMSKANSEVA |
| | | | QWRTKYETDAIQRTEELEEAKKKLA |
| | | | QRLQDAEEHVEAVNAKCASLEKTK |
| | | | QRLQNEVEDLMIDVERSNAACAALD |
| | | | KKQRNFDKILAEWKQKYEETHAELE |
| | | | ASQKESRSLSTELFKVKNAYEESLDQ |
| | | | LETLKRENKNLQQEISDLTEQIAEGG |
| | | | KRIHELEKIKKQVEQEKSEIQAALEE |
| | | | AEASLEHEEGKILRIQLELNQVKSEV |
| | | | DRKIAEKDEEIDQLKRNHVRVVESM |
| | | | QSMLDAEIRSRNDAIRLKKKMEGDL |
| | | | NEMEIQLNHANRMAAEALRNYRNT |
| | | | QGILKDTQIHLDDALRSQEDLKEQLA |
| | | | MVERRANLLQAEIEELRATLEQTERS |
| | | | RKVAEQELLDASERVQLLHTQNTSLI |
| | | | NTKKKLETDISQIQGEMEDIIQEARN |
| | | | AEEKAKKAITDAAMMAEELKKEQD |
| | | | TSAHLERMKKNLEQTVKDLQHRLDE |
| | | | AEQLALKGGKKQIQKLEARVRELEG |
| | | | EVESEQKRNVETVKGLRKHERRVKE |
| | | | LTYQTEEDRKNILRLQDLVDKLQAK |
| | | | VKSYKRQAEEAEEQSNVNLSKFRKL |
| | | | QHELEEAEERADIAESQVNKLRVKS |
| | | | REVHTKIISEE |
| SEQ ID | Q9DGM4 | Fast myosin | MASSDAEMAAFGEAAPYHRKSEKE |
| NO: 51 | (UniProtKB) | heavy chain | RIEAQNKPFDAKSSVFVAHPKESFVK |
| | | isoform 3/Gallus | GTIQSRETGKVTVKTEGGETLTVKED |
| | | gallus | QVFSMNPPKYDKIEDMAMMTHLHE |
| | | | PAVLYNLKERYAAWMIYTYSGLFCV |
| | | | TVNPYKWLPVYNPEVVLAYRGKKR |
| | | | QEAPPHIFSISDNAYQFMLTDRENQSI |
| | | | LITGESGAGKTVNTKRVIQYFATIAA |
| | | | SGEKKKEEQSGKMQGTLEDQIISANP |
| | | | LLEAFGNAETVRNDNSSRFGKFIRIH |
| | | | FGATGKLASADIETYLLEKSRVTFQL |
| | | | KAERSYHIFYQIMSNKKPELIDMLLIT |
| | | | TNPYDYHFVSQGEITVPSIDDQEELM |
| | | | ATDSAIDILGFTADEKTAISKLTGAV |
| | | | MHYGNLKFKQKQREEQAEPDGTEV |
| | | | ADKAAYLMGLNSADLLKALCYPRV |
| | | | KVGNEYVTKGQTVQQVHNAVGALA |
| | | | KAVYEKMFLWMVVRINQQLDTKQP |
| | | | RQYFIGVLDIAGFEIFDFNSFEQLCINF |
| | | | TNEKLQQFFNHHMFVLEQEEYKKEG |
| | | | IEWTFIDFGMDLAACIELIEKPMGIFSI |
| | | | LEEECMFPKATDTSFKNKLYDQHLG |
| | | | KSSNFQKPKPAKGKAEAHFSLVHYA |
| | | | GTVDYNITGWLEKNKDPLNETVIGL |
| | | | YQKSSVKTLALLFATYGGADAEAGG |
| | | | GGKKGGKKKGSSFQTVSALFRENLN |
| | | | KLMTNLRSTHPHFVRCIIPNETKTPG |
| | | | AMEHELVLHQLRCNGVLEGIRICRK |
| | | | GFPSRVLYADFKQRYKVLNASAIPEG |
| | | | QFIDSKKASEKLLSSIDVDHTQYKFG |
| | | | HTKVFFKAGLLGLLEEMRDEKLAQL |
| | | | ITRTQARSRGFLMRVEYQRMVERRE |
| | | | SIFCIQYNVRSFMNVKHWPWMKLFF |
| | | | KIKPLLKSAESEKEMANMKEEFEKT |
| | | | KEELAKSEAKRKELEEKMVKLVQEK |
| | | | NDLQLQVQAEADSLADAEERCDQLI |
| | | | KTKIQLEAKIKEVTERAEDEEEINAEL |
| | | | TAKKRKLEDECSELKKDMDDLELTL |
| | | | AKVEKEKHATENKVKNLTEEMAAL |
| | | | DETIVKLTKEKKALQEAHQQTLDDL |
| | | | QAEEDKVNTLTKAKTKLEQQVDDLE |
| | | | GSLEQEKKLRMDLERAKRKLEGDLK |
| | | | LAHDSIMDLENDKQQLDEKLKKKDF |
| | | | EISQIQSKIEDEQALGMQLQKKIKEL |
| | | | QARIEELEEEIEAERTSRAKAEKHRA |
| | | | DLSRELEEISERLEEAGGATAAQIDM |
| | | | NKKREAEFQKMRRDLEEATLQHEAT |
| | | | AAALRKKHADSTAELGEQIDNLQRV |
| | | | KQKLEKEKSELKMEIDDLASNMESV |
| | | | SKAKANLEKMCRTLEDQLSEIKTKE |
| | | | EEHQRMINDLNTQRARLQTEAGEYS |
| | | | RQVEEKDALISQLSRGKQAFTQQIEE |
| | | | LKRHLEEEIKAKNALAHALQSARHD |
| | | | CDLLREQYEEEQEAKGELQRALSKA |
| | | | NSEVAQWRTKYETDAIQRTEELEEA |
| | | | KKKLAQRLQDAEEHVEAVNAKCAS |
| | | | LEKTKQRLQNEVEDLMIDVERANAA |
| | | | CAALDKKQKNFDKILAEWKQKYEE |
| | | | TQAELEASQKESRSLSTELFKMKNA |
| | | | YEESLDHLQTLKRENKNLQQEISDLT |
| | | | EQIAEGGKAIHELEKVKKQIEQEKSEI |
| | | | QAALEEAEASLEHEEGKILRLQLELN |
| | | | QVKSEIDRKIAEKDEEIDQLKRNHLRI |
| | | | VESLQSSLDAEIRSRNEALRLKKKME |
| | | | GDLNEMEIQLSHANRVAAEAQKNLR |
| | | | NTQAVLKDTQIHLDDALRTQEVLKE |
| | | | QVAMVERRANLLQAEIEELRAALEQ |
| | | | TERSRKVAEQELMDASERVQLLHTQ |
| | | | NTSLINTKKKLETDIAQIQSEMEDTIQ |
| | | | EARNTEEKAKKAITDAAMMAEELK |
| | | | KEQDTSAHLERMKKNLDQTVKDLQ |
| | | | HRLDEAEQLALKGGKKQIQKLEARV |
| | | | RELEGEVDAEQKRSAEAVKGVRKYE |
| | | | RRVKELTYQSEEDLKNILRLQDLVD |
| | | | KLQMKVKSYKRQAEEAEELSNVNLS |
| | | | KFRKIQHELEEAEERADIAESQVNKL |
| | | | RVKSREFHSKKIEEEE |
| SEQ ID | P13538 | Myosin heavy | MASPDAEMAAFGEAAPYLRKSEKER |
| NO: 52 | (UniProtKB) | chain, skeletal | IEAQNKPFDAKSSVFVVHPKESFVKG |
| | | muscle, | TIQSKEGGKVTVKTEGGETLTVKED |
| | | adult/Gallus | QVFSMNPPKYDKIEDMAMMTHLHE |
| | | gallus | PAVLYNLKERYAAWMIYTYSGLFCV |
| | | | TVNPYKWLPVYNPEVVLAYRGKKR |
| | | | QEAPPHIFSISDNAYQFMLTDRENQSI |
| | | | LITGESGAGKTVNTKRVIQYFATIAA |
| | | | SGEKKKEEQSGKMQGTLEDQIISANP |
| | | | LLEAFGNAKTVRNDNSSRFGKFIRIH |
| | | | FGATGKLASADIETYLLEKSRVTFQL |
| | | | PAERSYHIFYQIMSNKKPELIDMLLIT |
| | | | TNPYDYHYVSQGEITVPSIDDQEELM |
| | | | ATDSAIDILGFSADEKTAIYKLTGAV |
| | | | MHYGNLKFKQKQREEQAEPDGTEV |
| | | | ADKAAYLMGLNSAELLKALCYPRV |
| | | | KVGNEFVTKGQTVSQVHNSVGALA |
| | | | KAVYEKMFLWMVIRINQQLDTKQPR |
| | | | QYFIGVLDIAGFEIFDFNSFEQLCINFT |
| | | | NEKLQQFFNHHMFVLEQEEYKKEGI |
| | | | EWEFIDFGMDLAACIELIEKPMGIFSI |
| | | | LEEECMFPKATDTSFKNKLYDQHLG |
| | | | KSNNFQKPKPAKGKAEAHFSLVHYA |
| | | | GTVDYNISGWLEKNKDPLNETVIGL |
| | | | YQKSSVKTLALLFATYGGEAEGGGG |
| | | | KKGGKKKGSSFQTVSALFRENLNKL |
| | | | MANLRSTHPHFVRCIIPNETKTPGAM |
| | | | EHELVLHQLRCNGVLEGIRICRKGFP |
| | | | SRVLYADFKQRYRVLNASAIPEGQF |
| | | | MDSKKASEKLLGSIDVDHTQYRFGH |
| | | | TKVFFKAGLLGLLEEMRDDKLAEIIT |
| | | | RTQARCRGFLMRVEYRRMVERRESI |
| | | | FCIQYNVRSFMNVKHWPWMKLFFKI |
| | | | KPLLKSAESEKEMANMKEEFEKTKE |
| | | | ELAKSEAKRKELEEKMVVLLQEKND |
| | | | LQLQVQAEADSLADAEERCDQLIKT |
| | | | KIQLEAKIKEVTERAEDEEEINAELTA |
| | | | KKRKLEDECSELKKDIDDLELTLAK |
| | | | VEKEKHATENKVKNLTEEMAVLDE |
| | | | TIAKLTKEKKALQEAHQQTLDDLQV |
| | | | EEDKVNTLTKAKTKLEQQVDDLEGS |
| | | | LEQEKKLRMDLERAKRKLEGDLKLA |
| | | | HDSIMDLENDKQQLDEKLKKKDFEI |
| | | | SQIQSKIEDEQALGMQLQKKIKELQA |
| | | | RIEELEEEIEAERTSRAKAEKHRADLS |
| | | | RELEEISERLEEAGGATAAQIEMNKK |
| | | | REAEFQKMRRDLEEATLQHEATAAA |
| | | | LRKKHADSTAELGEQIDNLQRVKQK |
| | | | LEKEKSELKMEIDDLASNMESVSKA |
| | | | KANLEKMCRTLEDQLSEIKTKEEQN |
| | | | QRMINDLNTQRARLQTETGEYSRQA |
| | | | EEKDALISQLSRGKQGFTQQIEELKR |
| | | | HLEEEIKAKNALAHALQSARHDCEL |
| | | | LREQYEEEQEAKGELQRALSKANSE |
| | | | VAQWRTKYETDAIQRTEELEEAKKK |
| | | | LAQRLQDAEEHVEAVNAKCASLEKT |
| | | | KQRLQNEVEDLMVDVERSNAACAA |
| | | | LDKKQKNFDKILAEWKQKYEETQTE |
| | | | LEASQKESRSLSTELFKMKNAYEESL |
| | | | DHLETLKRENKNLQQEIADLTEQIAE |
| | | | GGKAVHELEKVKKHVEQEKSELQAS |
| | | | LEEAEASLEHEEGKILRLQLELNQIKS |
| | | | EIDRKIAEKDEEIDQLKRNHLRIVES |
| | | | MQSTLDAEIRSRNEALRLKKKMEGD |
| | | | LNEMEIQLSHANRMAAEAQKNLRNT |
| | | | QGTLKDTQIHLDDALRTQEDLKEQV |
| | | | AMVERRANLLQAEVEELRGALEQTE |
| | | | RSRKVAEQELLDATERVQLLHTQNT |
| | | | SLINTKKKLETDIVQIQSEMEDTIQEA |
| | | | RNAEEKAKKAITDAAMMAEELKKE |
| | | | QDTSAHLERMKKNMDQTVKDLHVR |
| | | | LDEAEQLALKGGKKQLQKLEARVRE |
| | | | LEGEVDSEQKRSAEAVKGVRKYERR |
| | | | VKELTYQCEEDRKNILRLQDLVDKL |
| | | | QMKVKSYKRQAEEAEELSNVNLSKF |
| | | | RKIQHELEEAEERADIAESQVNKLRV |
| | | | KSREIHGKKIEEEE |
| SEQ ID | P16419 | Myosin-binding | MPEPSKAAPKKEAKKKEEKKEEKKE |
| NO: 53 | (UniProtKB) | protein C, fast- | APPPQEHKDEAPDDVHPPETPDPEGL |
| | | type/Gallus | FLSKPQNVMVESGRDVTVSARVAGA |
| | | gallus | ALPCAPAVKWFKGKWAELGDKSAR |
| | | | CRLRHSVDDDKVHTFELTITKVAMG |
| | | | DRGDYRCEVTAKEQKDSCSFSIDVE |
| | | | APRSSEGNVLQAFKRTGEGKDDTAG |
| | | | ELDFSGLLKKREVQVEEKKKKKDED |
| | | | DQFPPEIWELLKGVTKKSEYERIAFQ |
| | | | YGITDLRGMLKRLKKVHVEPKKSEA |
| | | | FIRKLDPAYQVDKGNKIKLVVELSDP |
| | | | DLPLKWYKNGQLLKPSTKYVFENVG |
| | | | LKRILTIHKCSLADDAAYECRVNDEK |
| | | | CFTEVFVKEPPVTVVRGLEDQQVVV |
| | | | GDRVVLEAEVSEEGAQVMWLKDGV |
| | | | DVTRDDAFKYRFKKDGKKHFLIINE |
| | | | AELSDSAHYKIMTNGGESEAELSVEE |
| | | | KQLEVLQDMADLTVKASEQAVFKC |
| | | | EVSDEKVTGRWFRNGVEVKPSKRIHI |
| | | | SHNGRFHKLVIDDVRPEDEGDYTFIP |
| | | | DGYALSLSAKLNFLEIKVEYVPKQEP |
| | | | PKIHLDCSGKAAENTIVVVAGNKVR |
| | | | LDVPISGEPAPTVTWKRGDQLFTATE |
| | | | GRVHIDSQADLSSFVIESAERSDEGR |
| | | | YCITVTNPVGEDSATLHVRVVDVPD |
| | | | PPQSVRVTSVGEDWAVLSWEAPPFD |
| | | | GGMPITGYLMERKKKGSMRWMKLN |
| | | | FEVFPDTTYESTKMIEGVFYEMRVFA |
| | | | VNAIGVSQPSLNTQPFMPIAPTSEPTH |
| | | | VVLEDVTDTTATIKWRPPERIGAGG |
| | | | VDGYLVEWCREGSNEWVAANTELV |
| | | | ERCGLTARGLPTGERLLFRVISVNMA |
| | | | GKSPPATMAQPVTIREIVERPKIRLPR |
| | | | HLRQTYIRRVGEQVNLVIPFQGKPRP |
| | | | QVTWSREGGALPAEVQTRTSDVDSV |
| | | | FFIRSAARPLSGNYEMRVRIDNMEDC |
| | | | ATLRLRVVERPGPPQAVRVMEVWG |
| | | | SNALLQWEPPKDDGNAEISGYTVQK |
| | | | ADTRTMEWFTVLEHSRPTRCTVSEL |
| | | | VMGNEYRFRVYSENVCGTSQEPATS |
| | | | HNTARIAKEGLTLKMVPYKERDLRA |
| | | | APQFLTPLVDRSVVAGYTVTLNCAV |
| | | | RGHPKPKVTWLKNSVEIGADPKFLS |
| | | | RHGLGVLSLLIRRPGPFDGGTYGCRA |
| | | | VNEMGEATTECRLDVRVPQ |
| SEQ ID | E1BNV1 | Myosin binding | MPEAKPAAKKAPAGKDAAAKPAPK |
| NO: 54 | (UniProtKB) | protein C, fast | EATPQEAPAAPPTEAPPEDQSPTAEE |
| | | type/Bos taurus | PTGVFLKKPDSVSVETGKDTVIVAKL |
| | | | NGKELPAKPAVKWFKGKWLELGSK |
| | | | SGARFSFKESHDAASNVYTIELHITK |
| | | | VVLGDRGDYRIEVKAKDFCDSCAFN |
| | | | IDVEAPRQDSAGQSLESFKRSGEAKS |
| | | | DTAGELDFSGLLKKRQVVEEEKKKK |
| | | | KDDDDLGIPPEIWELLKGAKKSEYER |
| | | | IAFQYGITDLRGMLKRLKKAKVEVK |
| | | | KSAAFTKKLDPAYQVDRGNKIKLVV |
| | | | EISDPDLPLKWFKNGQEIKPSSKYVF |
| | | | ENVGKKRILTINKCTLADDAAYEVV |
| | | | VKDEKCFTELFVKVEPPVLIVTPLED |
| | | | QQVFVGDRVEMAVEVSEEGAQVM |
| | | | WLKDGVELTREDSFKARYRLKKDG |
| | | | KRHILIYSEVTMEDKGHYQVMTNGG |
| | | | QCEAELIVEEKQLEVLQDIADLTVKA |
| | | | SEQAVFKCEVSDEKVTGKWYKNGV |
| | | | EVRPSKRITISHTGRFHKLVIDDVRPE |
| | | | DEGDYTFVPDGYALSLSAKLKFLEIK |
| | | | VEYVPKQEPPKIHLDCSGQTSENAIV |
| | | | VVAGNKLRMDVSITGEPRPVATWM |
| | | | KEDEVFTGTEGRVRIEQRGDISSFVIE |
| | | | SAERGDEGRYTIKVTNPVGEDVASIL |
| | | | LKVVDVPDPPEAVRVTSVGEDWAV |
| | | | LVWEPPKYDGGRPVTGYLLERKKK |
| | | | GSQRWMKLNFEVFTETTYESTNMIE |
| | | | GILYEMRVFAAPLIQQLKTLTPQPHA |
| | | | PFSPTSEPQHLTVEDVTDTTTTLKWR |
| | | | PPDKIGAGGIDGYLIEYCVEGSDEWI |
| | | | PANTEPVERCGFTVKNLPTGAKITFR |
| | | | VVGVNIAGRSQPATLAQPVTIREIVE |
| | | | QPKIRLPRHLRQTYVRKVGEHLNLVI |
| | | | PFQVRRAKGGAPIDTSHVHVRTSDF |
| | | | DTVFFVRQAARSDSGEYELTVQIEN |
| | | | MKDTATVCIRVVEKAGPPQNVMVK |
| | | | EVWGTNALVEWQPPKDDGNSEITGY |
| | | | FVQKADKKTMEWFTVYERNRHTSC |
| | | | TVSDLIMGNEYYFRVYSENVCGLSD |
| | | | LPGVSKNTARIVKTGMTLKLPEYKE |
| | | | HDFRTPPKFLTPLPDRVVVAGYAAA |
| | | | LNCAVRGHPKPKVVWMKNKMEIRE |
| | | | DPKFLMTNQQGVLTLNIRRPSPFDSG |
| | | | TYSCRAVNELGEALAECKLEVRAPR |
| SEQ ID | Q05623 | Myosin-binding | MTGKTAPAAAKKAPAAKKAPAPAS |
| NO: 55 | (UniProtKB) | protein H/Gallus | KKAPEPAPKEKPAPTPKEGHAPTPKE |
| | | gallus | EHAPPPKEEHAPPPKEEHAPAPAAET |
| | | | PPAPEHPPDAEQPAAPAAEHAPTPTH |
| | | | EAAPAHEEGPPPAAPAEAPAPEPEPE |
| | | | KPKEEPPSVPLSLAVEEVTENSVTLT |
| | | | WKAPEHTGKSSLDGYVVEICKDGST |
| | | | DWTAVNKEPFLSTRYKIHDLASGEK |
| | | | VHVRVKAISASGTSDPATLEQPVLIR |
| | | | EITDLPRIRLPRQLRQVYVRHVGEAV |
| | | | NLLIPFQGKPQPQVTWTKDNQPLDTS |
| | | | RVNIRNTDKDTIFFIRTAQRSDSGKY |
| | | | QLSVRINGAEDKAILDIRVIERPGPPQ |
| | | | NLKLVDVWGFNVALEWSPPADNGN |
| | | | SEIKGYTVQKSDKKSGKWFTVLERC |
| | | | TRTSCTISDLIIGNTYSFRVFSENACG |
| | | | MSETAAVAAGVAHIKKTVYQPQKIP |
| | | | ERDMMEPPKFTQPLTDRATTRGYST |
| | | | HLFCSVRGFPQPKIIWMKNKMEIRED |
| | | | PKYIAMIEQGVCSLEIRKPSPFDAGV |
| | | | YTCKAVNPLGEASVDCKLDVKMPK |
| SEQ ID | G3X6W9 | Myosin binding | MTEKATSEAPACGLEETTSESAHVPL |
| NO: 56 | (UniProtKB) | protein H/Bos | TEPSGDTAAPQAPGGEQAPRGQQAS |
| | | taurus | DPQESARQPPDPAASAAPAGPAATD |
| | | | PALPREDVPSAPLLLAVEDVSDSSVT |
| | | | VSWEPPERLGRLGLQGYVLELRREG |
| | | | ALDWVPVNARPMMVTQQTLRNLAV |
| | | | GDKFFVRVAAVSSAGAGPPAVLERLI |
| | | | HIQETIEAPKIRVPRHLRQTYIRQVGE |
| | | | SINLQIPFQGNPKPQALWTHNGHALD |
| | | | SQRVSVRTGDQDSILFIRSAQRSDSG |
| | | | CYELTVQLKDLEAKAAINILVIEKPG |
| | | | PPRSIRLLDVWNCNATLEWTPPQDT |
| | | | GNTELLGYTVQKADKKTGQWFTVL |
| | | | ERCHPTSCTVSDLIVGNSYSFRVFSE |
| | | | NLCGLSASAAVTKELAHIVKTDIVAK |
| | | | PKSFVERDFSEAPSFTQPLADHTSTPG |
| | | | YSTQLSCSVRASPKPKIIWMKNKMDI |
| | | | QGDPKYRALSEQGVCTLEIRKPSPFD |
| | | | SGVYTCKAINVLGEASVDCRLEVKA |
| | | | SATH |
| SEQ ID | A6BM71 | Connectin | MTTKAPTFTQPLQSVVALEGSAATFE |
| NO: 57 | (UniProtKB) | (Fragment)/Gallus | AHISGFPVPEVSWYRDGQVLSAATLP |
| | | gallus | GVQISFSDGRAKLVIPSVTEANSGRY |
| | | | TIQATNGSGQATSTAELLVTAGTAPP |
| | | | NFSQRLQSMTARQGSQVRLDVRVTG |
| | | | IPTPVVKFYRDGVEIQSSPDFQILQEG |
| | | | DLYSLIIAEAYPEDSGTYSVNATNNV |
| | | | GRATSTAELLIQGEEEAVPAKKTKTI |
| | | | VSTAQISQTRQARIEKKIETHFDARSL |
| | | | TSVEMVIEGAAAQQLPHKAPPRMPP |
| | | | RPTSKSPTPPVITAKAQMARQQSPSP |
| | | | VRQSPSPVRHVRAPTPSPVRSVSPAG |
| | | | RISTSPIRPVKSPSPIRKAQVVTPGAE |
| | | | VLPPWRQEGYSATAEAQMKETRVST |
| | | | SATEIRTEERWEGRYGLQEQVTISGA |
| | | | AAGEVAAGAKEVRKEPEKTPVPTVII |
| | | | ATDKAKEQERISTAREEISARHEQVH |
| | | | VSHEQIEAGKRAEAVATVVAAVDQ |
| | | | ARVRSPWETEQVDETYVKKKTLEYG |
| | | | YKEHAVKDHEAQAEHHVATKEVKT |
| | | | VYVPPEKHIPAAEKKEVHVSTEIKRE |
| | | | TEAKIEKTIHIEHPRPRTASPHFTVSKI |
| | | | AVPKPDHTYEVSIAGSAMATLEKELS |
| | | | ATSAAQKITKPVKPPQLKPHEVKIKP |
| | | | ESAPPQFPFTEAAETYKAHYDVETK |
| | | | KEVDVSIKGEAVREDHLLLRKESEA |
| | | | KVTETARVPVPAEIPVTPPTLVWGLK |
| | | | NKTVTEGESVTLECHISGHPQPTVTW |
| | | | YREDYKIESSMDFQITFKAGLARLVI |
| | | | REAFAEDSGRFTCTATNKAGSVSTSC |
| | | | HLHVKVSEETETRETISEKVVTEEKS |
| | | | YVETKDVVMEDVSAAAEEVSGEPVP |
| | | | PFFIRKPVVHKLIEGGSIIFECQVGGN |
| | | | PKPHVLWKKGGVPLTTGYRYKVSY |
| | | | KRETGECKLEISMTFADDAGEYTIVI |
| | | | RNKFGEASATVSLLEEADYEAYIKSQ |
| | | | QEMMYQTQVTAYVQEPKVAEVAPPI |
| | | | SYGDFDKEYEKEQALIRKKMAKDTV |
| | | | MVRTFVEDEEFHISSFEERLIKEIELRI |
| | | | IKTTLDELLEEDGEEMMIDISESEAIG |
| | | | AGFDLRLKNYRTFEGTGVTFHCKTT |
| | | | GYPLPKIAWYKDGKRIRHGERYHME |
| | | | VLQDGSASLRLPVVLPEDEGIYTVFA |
| | | | SNMKGNAICSAKLYVEPVAPTATPG |
| | | | YMPGPEVMRRYRSISPRSPSRSPARS |
| | | | SPSCSPARRLDETDEGQLERLYKPVF |
| | | | VLKPTSVKCSQGQTARFDLKVVGRP |
| | | | MPETYWFHNGQQVVNDYTHKIVIKE |
| | | | DGTQSLIIVPAMPEDSGEWAVIAQNR |
| | | | AGKASVSVTLSVEAKEDLVRPRFVE |
| | | | RLRNVSVKEGSRLHMAVKATGNPNP |
| | | | DIVWLKNSDIIVPHKYPRIRIEGTKGA |
| | | | AALNIESTARQDAAWYTATAINKAG |
| | | | RDTTRCKVNVEVEHAEPEPERRLIIP |
| | | | KGTYKAKEIAAPELEPLHLRYGQEQ |
| | | | WEEGDLYDKEKQQKPFFKKKLTSLR |
| | | | LKQFGPAHFECRLTPIGDPTMVVEW |
| | | | LHDGKPLEAANRLRMINEFGYCSLD |
| | | | YGVAYSRDSGVITCRATNKYGTDHT |
| | | | SATLIVKDEKSLVEESQLPEGRRGMQ |
| | | | RIEELERMAHEGALPAVAVDQKEKQ |
| | | | KPELVLVPEPARVLEGETARFRCRVT |
| | | | GYPLPKVNWYLNSQLIRKSKRFRLR |
| | | | YDGIHYLDIVDCKSYDTGEVKVTAE |
| | | | NPEGFIEHKVKLEIQQREDFRSVLRR |
| | | | APEPRHEPVVTEPGKLLFEVQKIDKP |
| | | | AEATTKEVVKLKRAERITHEKLSEES |
| | | | EELRSKFKRRTEEGYYEAITAVELKS |
| | | | RKKDESYEEMLKKTKEELLHWTKEI |
| | | | PEEEKKALPPEGKITIPTFKPEKVELS |
| | | | PSMEAPKIFERIQSQTVAQGTDAHFR |
| | | | VRVVGKPDPECQWFRNGVQIERTDR |
| | | | IYWYWPEDNVCELVIRDVTADDSAS |
| | | | IMVKAVNIAGETSSHAFLLVQAKQLI |
| | | | SFIQNLQDVVAKERDSMATFECETSE |
| | | | PFIKVKWFKNGIEIHSGEKYRMHSDR |
| | | | KAHFLSVLAVEMSDADDYSCALVED |
| | | | ESVKTTAKLIVEGAVVEFIKELEDVE |
| | | | VPESFTGELECEVSPEDIEGKWYHGD |
| | | | VELSSNHKYVLASRRGRRILTIKDVN |
| | | | KDDQGEYSFVVDGKRTHCKLKMKP |
| | | | RPMTILQGLTDQKVCEGDIVQLEVK |
| | | | VSVENVEGVWMKDGHEIQSSDRIHI |
| | | | VLDKQSHMLLIEDATQEDSGTYSFSI |
| | | | PGLELSTTGQVTVYSVEIIVPLKDVH |
| | | | VVEGTKAILECKVSAPDVTSSKWYL |
| | | | NDHQIKPDERVQAVCKGTKQRLVIT |
| | | | RTHASDEGHYKLMVGKVETSCNVT |
| | | | VEEIEIIRGLHDITCTETQNVSFEVELS |
| | | | HSGIDVIWHFKGQEIKAGPKYKIEAR |
| | | | GKIYKLTVVKMMKDDEGEYVFYAG |
| | | | GKKTSGKLIVAGGAISKPLADLTVAE |
| | | | SQRAVFECEVANPESEGQWLKNGKP |
| | | | LPMTDQYRAETDGVKRRLNIPAAKM |
| | | | DDMGEYSYEIASSKTSAKLHVEAVKI |
| | | | KKTLKNLTVTETQEAVFSVELSHPD |
| | | | VKGALWIKNGVELESNDKYEISVKG |
| | | | TVHTLKIKHCVVTDESVYSFKLGKIG |
| | | | ANARLHVETVKIIKKPKDVTALENA |
| | | | VVSFELSVSHDTVPVRWFHKNVELK |
| | | | QSDKYKMISQRKVHKLMLHNISPAD |
| | | | AGEYTAFVGQLECKAKLFVETIHITK |
| | | | TMKSIEIPETKTASFQCEVSHFNVPSV |
| | | | WLKNGVEIEMSEKFKIVVQGKLHQL |
| | | | NIMNTSSEDSAEYTFVCGNDRVSATL |
| | | | TVKPILITSMLEDINAEEKDTITFEVT |
| | | | VNYEGISYKWLKNGVEIKSTDKCQIR |
| | | | TKKLTHSLSIRNVHFGDAAEYSFVAG |
| | | | KAASSATLYVEARHIEFRKHIKDIKV |
| | | | VEKKRAIFECEISEPDVQVQWMKDG |
| | | | QELQIGDRMKIQREKYVHRLIIPSTK |
| | | | MSDAGQYTVVAGGNTSSANLIVEGR |
| | | | DVRIRSIRKEIQVIERQRAEIEFEVNE |
| | | | DDIEPQWYKDGIEINFHYEERYSYVV |
| | | | ERRIHRMSIFETTYSDAGEYTFVAGR |
| | | | NRSSVVLYVNAPEPPQIIQELQPTTVE |
| | | | SGKPARFCAIISGKPQPKVSWYKDDQ |
| | | | QLSPGFKCKFLHDAQEYTLLLIETFPE |
| | | | DSAVYTCEAKNDYGVATTSASLSVE |
| | | | IPEVVSPELEVPVYPPAVIVPLRDAVT |
| | | | SEGQSARFQCRVTGTDLKVSWYSKD |
| | | | REIKPSRFFRMTQFEDTYQLEIAEAYP |
| | | | EDEGTYTFVASNSVGQVTSTAILKLE |
| | | | APEKIMYEKLEEEIEMEVKVAPILRR |
| | | | RLEPLEVAVNHVAKFTCEVETTPNV |
| | | | KFQWYKAGREIYDGDKYSIRSSNYL |
| | | | STLEIPRPQVVDCGEYSCKASNQHGS |
| | | | VSSTAFLTVTEPPRFIKKLDSSRLVKQ |
| | | | HDSTRYECKVGGSPEIKVTWYKGET |
| | | | EIHPSEKYSMSFVDSVAVLEMHNLS |
| | | | VEDSGDYSCEAQNPAGSASTSTSLK |
| | | | VKAPPAFTKKPHPVQTLKGSDVHLE |
| | | | CELQGTPPFQISWYKDKREIRSSKKY |
| | | | KVMSENYLASIHILNVDTADVGEYH |
| | | | CKAVNDVGSDSCIGSVTLRAPPTFVK |
| | | | KLSDVTVVVGETIELQAAVEGAQPIS |
| | | | VLWLKDKGEIIRESENLWISYSENVA |
| | | | SLKIGNAEPTNAGKYICQIKNDAGFQ |
| | | | ECFAKLTVLEPAVIVEKPGPVKVTAG |
| | | | DSCTLECTVDGTPELTARWFKDGNE |
| | | | LSTDHKYKISFFNKVSGLKILNAGLE |
| | | | DSGEYTFEVKNSVGKSSCTASLQVS |
| | | | DRIMPPSFTRKLKETYGQLGSSAVLE |
| | | | CKVYGSPPILVSWFHDGQEITSGDKY |
| | | | QATLTDNTCSLKVNGLQESDMGTYS |
| | | | CTATNVAGSDECSAFLSVREPPSFVK |
| | | | KPEPFNVLSGENITFTSIVKGSPPLEV |
| | | | KWFRGSIELAPGHKCNITLQDSVAEL |
| | | | ELFDVQPLQSGDYTCQVSNEAGKISC |
| | | | TTHLFVKEPAKFVMKVNDLSVEKGK |
| | | | NLILECTYTGTPPISVTWKKNGVILK |
| | | | HSEKCSITTTETSAILEIPNSKLEDQG |
| | | | QYSCHIENDSGQDNCHGAITILEPPYF |
| | | | VTPLEPVQVTVGDSASLQCQVAGTP |
| | | | EMIVSWYKGDTKLRGTATVKMHFK |
| | | | NQVATLVFSQVDSDDSGEYICKVEN |
| | | | TVGEATSSSLLTVQERKLPPSFTRKL |
| | | | RDVHETVGLPVTFDCGIAGSEPIEVS |
| | | | WFKDNVRVKEDYNVHTSFIDNVAIL |
| | | | QILKTDKSLMGQYTCTASNAIGTASS |
| | | | SGKLVLTEGKTPPFFDTPITPVDGIIG |
| | | | ESADFECHISGTQPIRVTWAKDNQEI |
| | | | RTGGNYQISYVENTAHLTILRVDRG |
| | | | DSGKYTCYASNEVGKDSCTAQLNV |
| | | | KERKTPPTFTRKLSEAVEETEGNELK |
| | | | LEGRVAGSQPLTVSWYKNNQEVHSS |
| | | | PHCEISFKNNTLLLHIKSVGQSDAGL |
| | | | YTCKVSNEAGSVLCTSSVVIREPKKP |
| | | | PVFDQPLQPAATEEGDTLQLSCHVR |
| | | | GSEPIRIQWLKAGREIRASERCSFSFA |
| | | | NGVALLELAAVTKSDSGEYVCKASN |
| | | | VAGTDTCRSKVTVKEKAALVSAAK |
| | | | KADIEGKLYFVSEPQSIKVMEKTVAT |
| | | | FIAKVGGDPIPNVKWMKGKWRQLN |
| | | | QGGRIIIQQRGDEAKLEIKDTTKTDS |
| | | | GLYKCVAFNQHGEIERSVNLQVEER |
| | | | KQEVVEEDVRGKLKRIPTKKKEDEE |
| | | | QTIDILELLKNVDPKEYEKYARMYGI |
| | | | TDFRGLLQAFELLKQTREEESHRLEI |
| | | | ELTEKAQKEDQEFEELVAFIQQRLTQ |
| | | | TEPVTLIRDIENQTVLTDEDAIFECEI |
| | | | KINYPEIKLSWYKGTQKLDSSDKYKI |
| | | | KIEGDRHILKIKNCQLEDQGNYRIVC |
| | | | GPHIASARLTVIEPAVERHLHDTTFK |
| | | | EGNTCTLSCQFSIPNAKSQWYRNGRP |
| | | | IKIGGRYSTQVSDKVHKLIIKDVRTE |
| | | | DQGQYTCKLDNLETTADLTIEAEPIQ |
| | | | FTKSIQNIVVSEHQSATFECEVSFDDA |
| | | | VVTWYKGPTELTESPKYSFRSEGRC |
| | | | HYMTIHNVTAEDEGVYSVIARLEPR |
| | | | GEARSTAELYLVTKEIKLELKPPDVP |
| | | | DAKVAVPPQKPAEAAPIPILLPLIPTP |
| | | | EEKKPAEKKVPVKKVSKKVVKKGP |
| | | | KEIPPPEVPEILPEKPKEVKITSMARR |
| | | | EEIHEEKMEIYEKPKKVYEEWEEDY |
| | | | GEDHDYYFKEEGYDEGEEEWEETY |
| | | | DKREVAYEEEQIIHEEVVEVPKKPVP |
| | | | ERKPPAITAEKKEKKEVTVHKVPDV |
| | | | PKKIPEEKVPITVPKKPEPTPAKEPEV |
| | | | HKIIEEKIKVSEPKKPEVPPAKVPEVP |
| | | | KKVVKEEVSVEVPKKPEPPPAKVPE |
| | | | VPKKVVPEEKVHVEVPKKAEPPPPK |
| | | | VLRKKPEEEEPKPEKEPKPEVKPVPT |
| | | | PVEKIKKPEVPEVPKKKTEIPVIKKEE |
| | | | KHVPEPPKEPKPAAISVPGPEPKPAV |
| | | | ALKSPKPAAEPAPAITTAPVTTPVVG |
| | | | KKAEAKPTKEETPKGISPVKAKKTPS |
| | | | PADAERRKLRPGSGGEKPPEEPPFTY |
| | | | QLKAVPLKFVKEMKDIVLKEAESVG |
| | | | SSAIFEVLISPSTAITSWMKDGSNIRES |
| | | | PKHKFIADGKDRKLHIIDVQLSDAGE |
| | | | YTCVLRLGNKEKTSTAKLIVEELPVR |
| | | | FVKTLEEEVTVVKGQPLYLTCELNK |
| | | | ERSVVWRRDGKIIKDKPGKFALGIIG |
| | | | LSHSLTITDSDDSDAGTYTVTVEDSE |
| | | | LSCSSCVKVVEVIRDWLVKPIRDQH |
| | | | VKPKGTATFTCDIVKDTPNIKWFKG |
| | | | DEEIPAEPTDKTEILKEGNKIFLKIKN |
| | | | AGPADIGEYSVEVEGRRYPAKLTLG |
| | | | EREVELLKPLEDVTVYEKETANFDTE |
| | | | ISEEDIPGEWKLKGEILRPSPTCEIKAE |
| | | | GGKRFLTLHKVKLEQAGEVLYQALN |
| | | | AVTTAILTVKEIELDFAVPLKDVTVP |
| | | | EKRQARFECVLTREANVIWSKGTDIL |
| | | | KIGEKFDIIADGKKHILVINDSQFDDE |
| | | | GEYTAEVEGKKSTARLFVEGVRLKFI |
| | | | TPLQDQTVKEGETAYFQFELSHEGM |
| | | | LVKWYKNDKRLHTSRTVFITSEGKV |
| | | | HKLEMREVTLDDISEIKAVVKDMNT |
| | | | QANLKVLEADPYFTVKLQDYSALEK |
| | | | DDITLQCELSKDVPVKWYKDGEELV |
| | | | ASSRISIKTDGLRRILTIKKATEGDKG |
| | | | VYECSCGTDKTNCNIGVEPRLIKVER |
| | | | PLYGVEVFVGETARFEIEISEPDVHPI |
| | | | WKLKGETLTPSPECEIIEDGKKHILIL |
| | | | HQGRLDMTGEVSFQAANAKSAANL |
| | | | KVKELPLIFITPLSDVKVFEKDEAKFE |
| | | | CEVSREPKTFRWLKGTQEITPDERFEI |
| | | | ISDGTKHALIIKSVAFDDEAKYMFEA |
| | | | EDKRTSAKLIIEGIRLKFITPLKDVTK |
| | | | KERETAVFTVELSHENIPVVWFKND |
| | | | QRLHTSKVVSMTDDGKFHTLTIKDL |
| | | | TIDDTSQIRVEAMGKSSEAKLTVLEG |
| | | | DPYFTGKLQDYTAVEKDEVILQCEIS |
| | | | KADAPVKWMKDGKPITPSKNVVIKA |
| | | | DGKKRILILKKALKKDIGQYTCDCGT |
| | | | DQTSANLNIEDRDIEIIRPLYSVEVIET |
| | | | ETARFDIEISEEGVHGNWKLKGEPLT |
| | | | ESPDCEIKEEGKKHFLTLYNVRLDQA |
| | | | GGVDFQAANAKSGAHLRVKPRVIGL |
| | | | LRPLKDVTVTAGESATFDCELSYEGI |
| | | | PVEWYLQGKKLEPSDKVVTRAEGR |
| | | | AHTLILRDVKLTDAGEVSLTAKDFRT |
| | | | QANLFVKEPPVEFTKPLEDQTVEEEA |
| | | | TAILECEVSRENAKVKWFKNGEEIH |
| | | | KTKKYDIISEGRVRKLIIHGCTLDDA |
| | | | KTYTCDAKDFKTSCFLNVEPLRVEFL |
| | | | RPLTDLEVKEKRICSVLNVKFLAQGV |
| | | | KVKWFKDGIEIEKAEYDIISKGAERIL |
| | | | VISKCLFDDEAEYACEAKTARTSGLL |
| | | | TVIEEEAVFTKNLHDLEVNENETVRL |
| | | | ICEISKPNAEVTWFKGDEEVPDGGRF |
| | | | EYISDGRKRILVIRNAHPEDAGKYTC |
| | | | KLPSSSTTGKLTVHELAAEFLTRPQN |
| | | | LEVLEGDKAEFACSVSKEAITVQWL |
| | | | WGDTVLEPGDKYDIISDGKKRTLVV |
| | | | KDSVVGDAGKYTVMVGEAKATARL |
| | | | TVIEKTQDYNSLKDQEVNEGQEIIFN |
| | | | CEVNKEGAKEKWYKNGEAIFDSAK |
| | | | YIIVQKDLVYTLRIRDTQLKDQATYS |
| | | | ISLSNHRGEHAESSAALTVLEEGLRIV |
| | | | EPLEDIETMEKKTVTFWCKVNRLNA |
| | | | TLKWTKNGEEITFNKRILYKIDKYKH |
| | | | SLIIKDCGFKDEGEYTVTAGQDKSVA |
| | | | ELLITEAPADFIEHLQDQTVTEFDDA |
| | | | VFTCQLSKEKASVKWYRNGREIKEG |
| | | | KKYQFEKDGNLHRLIIKDCRLDDECE |
| | | | YSCGVDDRKSRARLFVEEIPVEIIRPP |
| | | | QDVYEAPGADVIFMAELNKDGVEV |
| | | | KWLRNNMIIIQGDKHQMMSEGKVH |
| | | | RLQVCEIKPRDQGEYRFIAKDKEARA |
| | | | KLELAAAPRIKTGDQNLVVDVGNPL |
| | | | TMTVPYDAYPRAEAEWLKGEESLPT |
| | | | TTVDTTTDCTTFKIYEAKKSDKGRY |
| | | | KVVLRNKHAQAEAFINVEVIDVPGP |
| | | | VRNLEVTEIYDGEVGLAWQEPESDG |
| | | | GSKIIGYVVERRDIKRKTWIVVTDHA |
| | | | ENCEYTVTGLQKGGVEYLFRVSARN |
| | | | RVGTGEPVETERPVEAKSKFEVPGPP |
| | | | QNVEVTDVNRFGRTLTWEAPEYDG |
| | | | GSPITGYVIELRNRASIKWEPTMTTG |
| | | | ADELSAVLTDVVENEEYFFRVRAQN |
| | | | MVGVGKPSHPTRAVKITDPIERPSGN |
| | | | INLDHSDQTKTSVQLTWEPPLEDGGS |
| | | | PILGYIIERKEEGTDKWIRCNPKLVPA |
| | | | CAFKVTGLKAGSSYYYRVSAENAAG |
| | | | VSDPAEAIGPLTADDPFVDLQWPLSA |
| | | | FKDGLEVIVPEPIKIRVPITGYPIPTAT |
| | | | WSFGDQVLEEGGRVTMKTTSTFAEL |
| | | | VITPSERPDKGIYTLTLENPVSSVSGEI |
| | | | DVNVLARPSAPKELKVVDVSRSTVQ |
| | | | LSWEPPEDDGGSPVIDYIIEKREVSRK |
| | | | TWIKVMDHVIDQEFSVPDLIQGKEYL |
| | | | FRVCACNKCGPGEPAYIDEPINMSAP |
| | | | ATVPDPPENVKWRNPTSKGIFLTWEP |
| | | | PKYDGGARIKGYLVEKCQRGTDKW |
| | | | EICGEPVIETKMEVTKLKEGEWYAY |
| | | | RVKALNRIGASKPSKPTDDIQAIDAK |
| | | | EAPEIFLDVKLLAGLTVKAGTKIELP |
| | | | AKITGKPEPQITWTKAEKLLRPDDRI |
| | | | TIETTPNHSTVTITDSKRSDSGTYIIEA |
| | | | VNSSGRATAVVEVNVLDKPGPPAAF |
| | | | DVSEITNESCLLTWNPPRDDGGSKIT |
| | | | NYVLEKRATDSEIWHKLSSTI |
| SEQ ID | A6BLM7 | Titin isoform | EGEEEWEETYDKREVAYEEEQIIHEE |
| NO: 58 | (UniProtKB) | Ch12 | VVEVPKKPVPERKPPAITAEKKEKKE |
| | | (Fragment)/Gallus | VTVHKVVKKPVDEKVEITTQRVAEE |
| | | gallus | KLKQAEVTKKIPSAKPTPMIIEEKVM |
| | | | KKEAHKEVEEEEEREVISEELETHHV |
| | | | EVPDVPKKIPEEKVPITVPKKPEPTPA |
| | | | KEPEVHKIIEEKIKVSEPKKPEVPPAK |
| | | | VPEVPKKVVKEEVSVEVPKKPEPPPA |
| | | | KVPEVPKKVVPEEKVHVEVPKKAEP |
| | | | PPPKVLRKKPEEEEPKPEKEPKPEVK |
| | | | PVPTPVEKIKKPEVPEVPKKKTEIPVI |
| | | | KKEEKHVPEPPKEPKPAAISVPGPEP |
| | | | KPAVALKSPKPAAEPAPAITTAPVTT |
| | | | PWGKKAEAKPTKEETPKGISPVKA |
| | | | KKTPSPADAERRKLRPGSGGEKPPEE |
| | | | PPFTYQLKAVPLKFVKEMKDIVLKE |
| | | | AESVGSSAIFEVLISPSTAITSWMKDG |
| | | | SNIRESPKHKFIADGKDRKLHIIDVQL |
| | | | SDAGEYTCVLRLGNKEKTSTAKLIVE |
| | | | ELPVRFVKTLEEEVTVVKGQPLYLTC |
| | | | ELNKERSVVWRRDGKIIK |
| SEQ ID | A6BLM8 | Titin isoform | SDKYKIKIEGDRHILKIKNCQLEDQG |
| NO: 59 | (UniProtKB) | b11 | NYRIVCGPHIASARLTVIAEPIQFTKSI |
| | | (Fragment)/Gallus | QNIVVSEHQSATFECEVSFDDAVVT |
| | | gallus | WYKGPTELTESPKYSFRSEGRCHYM |
| | | | TIHNVTAEDEGVYSVIARLEPRGEAR |
| | | | STAELYLVTKEIKLELKPPDVPDAKV |
| | | | AVPPQKPAEAAPIPILLPLIPTPEEKKP |
| | | | AEKKVPVKKVSKKVVKKGPKEIPPP |
| | | | EVPEILPEKPKEVKITSMARREEIHEE |
| | | | KMEIYEKPKKVYEEWEEDYGEDHD |
| | | | YYFKEEGYDEGEEEWEETYDKREVA |
| | | | YEEEQIIHEEVVEVPKKPVPERKPPAI |
| | | | TAEKKEKKEVTVHKVPDVPKKIPEE |
| | | | KVPITVPKKPEPTPAKEPEVHKIIEEKI |
| | | | KVSEPKKPEVPPAKVPEVPKKVVKE |
| | | | EVSVEVPKKPEPPPAKVPEVPKKVVP |
| | | | EEKVHVEVPKKAEPPPPKVLRKKPEE |
| | | | EEPKPEKEPKPEVKPVPTPVEKIKKPE |
| | | | VPEVPKKKTEIPVIKKEEKHVPEPPKE |
| | | | PKPAAISVPGPEPKPAVALKSPKPAA |
| | | | EPAPAITTAPVTTPVVGKKAEAKPTK |
| | | | EETPKGISPVKAKKTPSPADAERRKL |
| | | | RPGSGGEKPPEEPPFTYQLKAVPLKF |
| | | | VKEMKDIVLKEAESVGSSAIFEVLISP |
| | | | STAITSWMKDGSNIRESPKHKFIADG |
| | | | KDRKLHIIDVQLSDAGEYTCVLRLG |
| | | | NKEKTSTAKLIVEELPVRFVKTLEEE |
| | | | VTVVKGQPLYLTCELNKERSVVWRR |
| | | | DGKIIKDKPGKFALGIIGLSHSLTITDS |
| | | | DDSDAGTYTVTVEDSELSCSSCVKV |
| | | | VEVIRDWLVKPIRDQHVKPKGTATF |
| | | | TCDIVKDTPNIKWFKGDEEIPAEPTD |
| | | | KTEILKEGNKIFLKIKNAGPADIGEYS |
| | | | VEVEGRRYPAKLTLGEREVELLKPLE |
| | | | DVTVYEKETANFDTEISEEDIPGEWK |
| | | | LKGEILRPSPTCEIKAEGGKRFLTLHK |
| | | | VKLEQAGEVLYQALNAVTTAILTVK |
| | | | EIELDFAVPLKDVTVPEKRQARFEC |
| SEQ ID | P79757 | Connectin/titin | KSRLRRRREREITEITSEEEEEIEMVQ |
| NO: 60 | (UniProtKB) | (Fragment)/Gallus | HVHREFSPPSRLLRRRRSLSPTYIELM |
| | | gallus | RPVSELIRPRSRPPEESERRSPTPERTR |
| | | | PRSPSPVSTERSLSRFERMARFDIFSR |
| | | | YESMKSALKTQKTMERKYEVLTQQP |
| | | | FTLDHAPRITLRMRSHRVPCGHNTRF |
| | | | ILNVQSKPTADVKWYHNGIELQESS |
| | | | KIHFSNTSGVLTLEILDCHIDDSGTYR |
| | | | AVCTNYKGECSDYATLDVTGGDYT |
| | | | TYSSQRRDEEVPRSILPDLTRTEAYA |
| | | | VSSFKKATAAEASSSVREVKSEVSAT |
| | | | RESLLSYEHHASSEEKITASEEKSLEE |
| | | | RTVHKAFKSTLPATILTKPRSITVSEG |
| | | | ETARFSCDVDGEPAPTITWVRAGQPI |
| | | | VSSRRFQITRTQYKSTFEISLVQIADE |
| | | | GSYTVVVENSEGRQEAHFTLTVQRK |
| | | | RIPEKAITSPPRIKSPEPRVKSPEPVKS |
| | | | PKRVKSPEPISTPSKAKSPPGDKTAPV |
| | | | EKVQLPTASPPKIKEQLKAETLGDKV |
| | | | KLSCAVESSVLSIREVAWYKDGKKL |
| | | | KEDHHFKFHYAADGTYELKIHNLTE |
| | | | SDKGEYTCEIMGEGGISKTNFQFTGQ |
| | | | VFKNIHSQVQSVSETPKSVEKGDKVL |
| | | | AVSTQKKSSAATEEKAAIEEVIKKSI |
| | | | VTEDVKQLQAEIRASSTQMTVSEGQ |
| | | | KVTLKANIPGASEVKWVLNGMELR |
| | | | NSDDYRYGISGSNHTLTIKKASNKDE |
| | | | GILTCEGKTDEGTIKCQYVLTFSKEPS |
| | | | NEPAFITQPKSQNVNEGQDVLFTCEV |
| | | | SGDPSPEVEWLRNNQPIAVSSHMRA |
| | | | TRSKNTYSLEIRNAAVSDTGKYTVK |
| | | | AKNYHGQCSATASLTVFPLIEEPPKE |
| | | | VVLKTSGDASMHESFSSQSFQMAAS |
| | | | KQEASFSSFSSSSMTETKFASMSAKS |
| | | | MSSMKESFVEMSSSSIMGKSSMAQL |
| | | | ESSTSKMLKSGVRGVPPKIEALPSDIS |
| | | | IDEGKVLTLSCAFSGEPAPEITWYCR |
| | | | GRKITSQDQQGRFHIETSEDLTTLIIM |
| | | | DVQKNDGGIYTLNLGNEFGTDSATV |
| | | | NINIRS |
| SEQ ID | Q98918 | Connectin/titin | MTTKAPTFTQPLQSVVALEGSAATFE |
| NO: 61 | (UniProtKB) | (Fragment)/Gallus | AHISGFPVPEVSWYRDGQVLSAATLP |
| | | gallus | GVQISFSDGRAKLVIPSVTEANSGRY |
| | | | TIQATNGSGQATSTAELLVTAGTAPP |
| | | | NFSQRLQSMTARQGSQVRLDVRVTG |
| | | | IPTPVVKFYRDGVEIQSSPDFQILQEG |
| | | | DLYSLIIAEAYPEDSGTYSVNATNNV |
| | | | GRATSTAELLIQGEEEAVPAKKTKTI |
| | | | VSTAQISQTRQARIEKKIETHFDARSL |
| | | | TSVEMVIEGAAAQQLPHKAPPRMPP |
| | | | RPTSKSPTPPVITAKAQMARQQSPSP |
| | | | VRQSPSPVRHVRAPTPSPVRSVSPAG |
| | | | RISTSPIRPVKSPSPIRKAQVVTPGAE |
| | | | VLPPWRQEGYSATAEAQMKETRVST |
| | | | SATEIRTEERWEGRYGLQEQVTISGA |
| | | | AAGEVAAGAKEVRKEPEKTPVPTVII |
| | | | ATDK |
| | | | AKEQERISTAREEISARHEQVHVSHE |
| | | | QIEAGKRAEAVATVVAAVDQARVR |
| | | | SPWETEQVDETYVKKKTLEYGYKEH |
| | | | AVKDHEAQAEHHVATKEVKTVYVP |
| | | | PEKHIPAAEKKEVHVSTEIKRETEAKI |
| | | | EKTIHIEHPRPRTASPHFTVSKIAVPK |
| | | | PDHTYEVSIAGSAMATLEKELSATSA |
| | | | AQKITKPVKPPQLKPHEVKIKPESAPP |
| | | | QFPFTEAAETYKAHYDVETKKEVDV |
| | | | SIKGEAVREDHLLLRKESEAKVTETA |
| | | | RVPVPAEIPVTPPTLVWGLKNKTVTE |
| | | | GESVTLECHISGHPQPTVTWYREDY |
| | | | KIESSMDFQITFKAGLARLVIREAFAE |
| | | | DSGRFTCTATNKAGSVSTSCHLHVK |
| | | | VSEETETRETISEKVVTEEKSYVETK |
| | | | DVVMEDVSAAAEEVSGEPVPPFFIRK |
| | | | PVVHKLIE |
| | | | GGSIIFECQVGGNPKPHVLWKKGGV |
| | | | PLTTGYRYKVSYKRETGECKLEISMT |
| | | | FADDAGEYTIVIRNKFGEASATVSLL |
| | | | EEADYEAYIKSQQEMMYQTQVTAY |
| | | | VQEPKVAEVAPPISYGDFDKEYEKE |
| | | | QALIRKKMAKDTVMVRTFVEDEEFH |
| | | | ISSFEERLIKEIELRIIKTTLDELLEEDG |
| | | | EEMMIDISESEAIGAGFDLRLKNYRT |
| | | | FEGTGVTFHCKTTGYPLPKIAWYKD |
| | | | GKRIRHGERYHMEVLQDGSASLRLP |
| | | | VVLPEDEGIYTVFASNMKGNAICSA |
| | | | KLYVEPVAPTATPGYMPGPEVMRRY |
| | | | RSISPRSPSRSPARSSPSCSPARRLDET |
| | | | DEGQLERLYKPVFVLKPTSVKCSQG |
| | | | QTARFDLKVVGRPMPETYWFHNGQ |
| | | | QVVNDYTHKIVIKEDGTQSLIIVPAM |
| | | | PEDSGEWAVIA |
| | | | QNRAGKASVSVTLSVEAKEDLVRPR |
| | | | FVERLRNVSVKEGSRLHMAVKATG |
| | | | NPNPDIVWLKNSDIIVPHKYPRIRIEG |
| | | | TKGAAALNIESTARQDAAWYTATAI |
| | | | NKAGRDTTRCKVNVEVEHAEPEPER |
| | | | RLIIPKGTYKAKEIAAPELEPLHLRYG |
| | | | QEQWEEGDLYDKEKQQKPFFKKKL |
| | | | TSLRLKQFGPAHFECRLTPIGDPTMV |
| | | | VEWLHDGKPLEAANRLRMINEFGYC |
| | | | SLDYGVAYSRDSGVITCRATNKYGT |
| | | | DHTSATLIVKDEKSLVEESQLPEGRR |
| | | | GMQRIEELERMAHEGALPAVAVDQ |
| | | | KEKQKPELVLVPEPARVLEGETARFR |
| | | | CRVTGYPLPKVNWYLNSQLIRKSKR |
| | | | FRLRYDGIHYLDIVDCKSYDTGEVK |
| | | | VTAENPEGFIEHKVKLEIQQREDFRS |
| | | | VLRRAPEPRHEPVVT |
| | | | EPGKLLFEVQKIDKPAEATTKEVVKL |
| | | | KRAERITHEKLSEESEELRSKFKRRTE |
| | | | EGYYEAITAVELKSRKKDESYEEML |
| | | | KKTKEELLHWTKEIPEEEKKALPPEG |
| | | | KITIPTFKPEKVELSPSMEAPKIFERIQ |
| | | | SQTVAQGTDAHFRVRVVGKPDPECQ |
| | | | WFRNGVQIERTDRIYWYWPEDNVCE |
| | | | LVIRDVTADDSASIMVKAVNIAGETS |
| | | | SHAFLLVQAKQLISFIQNLQDVVAKE |
| | | | RDSMATFECETSEPFIKVKWFKNGIEI |
| | | | HSGEKYRMHSDRKAHFLSVLAVEM |
| | | | SDADDYSCALVEDESVKTTAKLIVE |
| | | | GAVVEFIKELEDVEVPESFTGELECE |
| | | | VSPEDIEGKWYHGDVELSSNHKYVL |
| | | | ASRRGRRILTIKDVNKDDQGEYSFVV |
| | | | DGKRTHCKLKMKPRPMTILQGLTDQ |
| | | | KVCEGDIV |
| | | | QLEVKVSVENVEGVWMKDGHEIQS |
| | | | SDRIHIVLDKQSHMLLIEDATQEDSG |
| | | | TYSFSIPGLELSTTGQVTVYSVEIIVPL |
| | | | KDVHVVEGTKAILECKVSAPDVTSS |
| | | | KWYLNDHQIKPDERVQAVCKGTKQ |
| | | | RLVITRTHASDEGHYKLMVGKVETS |
| | | | CNVTVEEIEIIRGLHDITCTETQNVSF |
| | | | EVELSHSGIDVIWHFKGQEIKAGPKY |
| | | | KIEARGKIYKLTVVKMMKDDEGEY |
| | | | VFYAGGKKTSGKLIVAGGAISKPLA |
| | | | DLTVAESQRAVFECEVANPESEGQW |
| | | | LKNGKPLPMTDQYRAETDGVKRRL |
| | | | NIPAAKMDDMGEYSYEIASSKTSAK |
| | | | LHVEAVKIKKTLKNLTVTETQEAVFS |
| | | | VELSHPDVKGALWIKNGVELESNDK |
| | | | YEISVKGTVHTLKIKHCVVTDESVYS |
| | | | FKLGKIGANARLHVE |
| | | | TVKIIKKPKDVTALENAVVSFELSVS |
| | | | HDTVPVRWFHKNVELKQSDKYKMI |
| | | | SQRKVHKLMLHNISPADAGEYTAFV |
| | | | GQLECKAKLFVETIHITKTMKSIEIPE |
| | | | TKTASFQCEVSHFNVPSVWLKNGVE |
| | | | IEMSEKFKIVVQGKLHQLNIMNTSSE |
| | | | DSAEYTFVCGNDRVSATLTVKPILIT |
| | | | SMLEDINAEEKDTITFEVTVNYEGIS |
| | | | YKWLKNGVEIKSTDKCQIRTKKLTH |
| | | | SLSIRNVHFGDAAEYSFVAGKAASSA |
| | | | TLYVEARHIEFRKHIKDIKVVEKKRA |
| | | | IFECEISEPDVQVQWMKDGQELQIGD |
| | | | RMKIQREKYVHRLIIPSTKMSDAGQY |
| | | | TVVAGGNTSSANLIVEGRDVRIRSIR |
| | | | KEIQVIERQRAEIEFEVNEDDIEPQWY |
| | | | KDGIEINFHYEERYSYVVERRIHRMSI |
| | | | FETTYS |
| | | | DAGEYTFVAGRNRSSVVLYVNAPEP |
| | | | PQIIQELQPTTVESGKPARFCAIISGKP |
| | | | QPKVSWYKDDQQLSPGFKCKFLHD |
| | | | AQEYTLLLIETFPEDSAVYTCEAKND |
| | | | YGVATTSASLSVEIPEVVSPELEVPV |
| | | | YPPAVIVPLRDAVTSEGQSARFQCRV |
| | | | TGTDLKVSWYSKDREIKPSRFFRMT |
| | | | QFEDTYQLEIAEAYPEDEGTYTFVAS |
| | | | NSVGQVTSTAILKLEAPEKIMYEKLE |
| | | | EEIEMEVKVAPILRRRLEPLEVAVNH |
| | | | VAKFTCEVETTPNVKFQWYKAGREI |
| | | | YDGDKYSIRSSNYLSTLEIPRPQVVD |
| | | | CGEYSCKASNQHGSVSSTAFLTVTEP |
| | | | PRFIKKLDSSRLVKQHDSTRYECKVG |
| | | | GSPEIKVTWYKGETEIHPSEKYSMSF |
| | | | VDSVAVLEMHNLSVEDSGDYSCEAQ |
| | | | NPAGSAST |
| | | | STSLKVKAPPAFTKKPHPVQTLKGSD |
| | | | VHLECELQGTPPFQISWYKDKREIRS |
| | | | SKKYKVMSENYLASIHILNVDTADV |
| | | | GEYHCKAVNDVGSDSCIGSVTLRAP |
| | | | PTFVKKLSDVTVVVGETIELQAAVE |
| | | | GAQPISVLWLKDKGEIIRESENLWIS |
| | | | YSENVASLKIGNAEPTNAGKYICQIK |
| | | | NDAGFQECFAKLTVLEPAVIVEKPGP |
| | | | VKVTAGDSCTLECTVDGTPELTARW |
| | | | FKDGNELSTDHKYKISFFNKVSGLKI |
| | | | LNAGLEDSGEYTFEVKNSVGKSSCT |
| | | | ASLQVSDRIMPPSFTRKLKETYGQLG |
| | | | SSAVLECKVYGSPPILVSWFHDGQEI |
| | | | TSGDKYQATLTDNTCSLKVNGLQES |
| | | | DMGTYSCTATNVAGSDECSAFLSVR |
| | | | EPPSFVKKPEPFNVLSGENITFTSIVK |
| | | | GSPPLEVKWF |
| | | | RGSIELAPGHKCNITLQDSVAELELF |
| | | | DVQPLQSGDYTCQVSNEAGKISCTT |
| | | | HLFVKEPAKFVMKVNDLSVEKGKN |
| | | | LILECTYTGTPPISVTWKKNGVILKHS |
| | | | EKCSITTTETSAILEIPNSKLEDQGQY |
| | | | SCHIENDSGQDNCHGAITILEPPYFVT |
| | | | PLEPVQVTVGDSASLQCQVAGTPEM |
| | | | IVSWYKGDTKLRGTATVKMHFKNQ |
| | | | VATLVFSQVDSDDSGEYICKVENTV |
| | | | GEATSSSLLTVQERKLPPSFTRKLRD |
| | | | VHETVGLPVTFDCGIAGSEPIEVSWF |
| | | | KDNVRVKEDYNVHTSFIDNVAILQIL |
| | | | KTDKSLMGQYTCTASNAIGTASSSG |
| | | | KLVLTEGKTPPFFDTPITPVDGIIGES |
| | | | ADFECHISGTQPIRVTWAKDNQ |
| SEQ ID | Q07784 | Titin | RESDHRAWTPVSYTVTRQNAVVQG |
| NO: 62 | (UniProtKB) | (Fragment)/Gallus | LTEGKAYFFRIAAENIIGMGPFTETTK |
| | | gallus | ELIIRDPITVPDRPEDLEVKAVTKNSV |
| | | | TLTWNPPKYNGGSDITMYVLESRLIG |
| | | | KEKFHRVTKEKMLDRKYTVEGLKE |
| | | | GDTYEYRVSACNIVGQGKPSFCTKPI |
| | | | TCKDEIAPPTLDLDFRDKLIVRVGEA |
| | | | FSLTGRYSGKPTPKITWLRDDIVLKE |
| | | | DDRTKIKTTPTTLCLGILKSVREDSG |
| | | | KYCVTVENSTGSRKGFCQVTVVDRP |
| | | | SPPVGPVIFDEVHKDHMIVSWKPPLD |
| | | | DGGSEITNYIIEKKDTHRDLWMPVTS |
| | | | ATVKTTCKIPKLLEGREYQVRIYAEN |
| | | | LYGISDPLISDEMKAKDRFSVPDAPE |
| | | | QPVIKDVTKDSAVVVWNKPYDGGK |
| | | | PITNYIVEKKETMATRWVRVTKDPIF |
| | | | PSTQFKVPDLLEGCQYEFRVSAENEI |
| | | | GVGNPSPPSKPIFARDPIVKPSPPVNP |
| | | | EAVDKTKNSVDLTWQPPRHDGNGKI |
| | | | IGYLVEYQKVGDEEWKKANLTPDSC |
| | | | PETKYKVTGLTEGLTYKFRVMAVNA |
| | | | AGESEPAYVPDPVEVKDRLEPPELIL |
| | | | DANMAREQHVRAGDTLRLSAVIKG |
| | | | VPFPKVSWKKEDKEVSPKADIEVTG |
| | | | VGSKLEIRNTVHEDGGIYSLTVENPA |
| | | | GSKTVSVKVLVLDKPGPPRNLQVSD |
| | | | VRSDSCYLTWKEPEDDGGSVITNYV |
| | | | VERKDVASAQWVSVSSSSKKRSHM |
| | | | AKYLMEGTQYLFRVAAENLFGRGPY |
| | | | VETLKPIKAMDPLHPPGPPKNLHHID |
| | | | VDKTEVSLVWNRPDRDGGAEITGYL |
| | | | VEYQEDGADEWTKFQTVPMLDCVV |
| | | | TGL |
| SEQ ID | Q90720 | Titin | VTTKQTVISRTREGIVTSQEQRHISRE |
| NO: 63 | (UniProtKB) | (Fragment)/Gallus | KVRKEPEKTPVPTVIIVTAKVKEQERI |
| | | gallus | STAREEISARHEQVHVSHEQIRREDV |
| | | | KPSVPKVVITTDKPKAPVLISQSKEGI |
| | | | ATKKEHVSISHEKIKKEAKKTTAVLK |
| | | | IIAPVTVSRTREEITAKPEQMHLAYD |
| | | | QIEAGKRAEAVATVVAAVDQARVR |
| | | | SPWETEQVDETYVKKKTLEYGYKEH |
| | | | AVKAHEAQAEHHVATKEVKTVYVP |
| | | | PEKHIPAAEKKEVHVSTEIKRETEAKI |
| | | | EKTNHIEHPRPRTASPHFTVSKIAVPK |
| | | | PDHTYEVSIAGSAMATLEKELSATSA |
| | | | EQKITKPVKPPQLKPHEVKIKPESAPP |
| | | | PFPFTEAAETYKAHYDVETKKEVDV |
| | | | SIKGGAVREDHLLLRKESEAKVTETA |
| | | | RVPVPAEIPVTPTHLVWGLKNKTVT |
| | | | EGESVTLECHISGHPQPTVTWYRDD |
| | | | YKIESSMDFQITFKAGLARLVIREAF |
| | | | AEASGRFTCTATNKAGSVSTSCHLH |
| | | | VKVSEETETRETISEKVVTEEKSYVE |
| | | | TQDVVMEDASPPPEEVSGEPVPPFFI |
| | | | RKPVVHTLIVGGSIIFEFHVGGNPKPH |
| | | | VLLKKGGVPLTTGYRYKVSYKRETG |
| SEQ ID | F1N757 | Titin/Bos taurus | MATQAPTFTQPLQSVVVLEGSTATFE |
| NO: 64 | (UniProtKB) | | AHISGFPVPEVSWFRDGQVISTSTLPG |
| | | | VQISFSDGRAKLTIPAVTKANSGRYS |
| | | | LRATNGSGQATSTAELLVTAETAPPN |
| | | | FTQRLQSMTVRQGSQVRLQVRVTGI |
| | | | PTPVVKFYRDGAEIQSSLDFQISQEGE |
| | | | LYSLLIAEAYPEDSGTYSVNATNSVG |
| | | | RATSTAELLVQGEEVVPAKRTKTIVS |
| | | | TAQISETRQTRIEKKIEAHFDARSIAA |
| | | | VEMVIDGAAGQQLPHKTPPRIPPKPK |
| | | | SRSPTPPSIAAKAQLARQQSPSPIRHS |
| | | | PSPVRHVRAPTPSPVRSVSPAGRISTS |
| | | | PIRSVKSPLLVRKAQTPTMPPGPEVPP |
| | | | PWKQEGYVASSEAEMRETTVTSATQ |
| | | | IRTEERWEGRYGIQEQVTISGAAGAA |
| | | | ASTTFAAGAVAAGAAEVKQEADKS |
| | | | AAVATVVAAVDMARVREPVISAVE |
| | | | QTAQRTTTTAVHIQPAHEQIRKEAEK |
| | | | TAVTKVVVAADKAKEQEVKARTRE |
| | | | VITTKQEQVHVTHEQIRKETEKAFVP |
| | | | KVVISAAKAKEKETKITGEITTKQEQ |
| | | | KQITQETIIQKAETAAVSMVVVETAK |
| | | | PTTLETILGAQEEIVTQQDQMHITHE |
| | | | KILKETRKTVVPKVIVATPKVKEQDV |
| | | | VSRTREGITTKREQVQVTHEKMRKE |
| | | | AEKTALSTIAVATAKAKEQETILRTR |
| | | | EEMATRQEQIQVTHGKVGVGKKAE |
| | | | AVATVVAAVDQARVREPREPRHVEE |
| | | | SYAQQTTLEYGYKEHISATKVAEQPP |
| | | | RPASEPQVVPKAVKPGVIHAPSETHI |
| | | | ATTDQMGMHISSQIKKTTDLTSERLV |
| | | | HVDKRPRTASPHFTVSKISVPKTEHG |
| | | | YEASIAGSAIATLQKELSATPSAQKV |
| | | | TKSVKAPTVKPAEARVRAEPTPSPQF |
| | | | PFAETPETFKSQAGIEVKKEVGVSITG |
| | | | VAVREERFEALRERETKVTETARVP |
| | | | APVEIPVTPPTLVSGLKNVTVIEGESV |
| | | | TLECHISGYPSPKVTWYREDYQIESSI |
| | | | DFQITFQSGIARLLIREAFAEDSGRFT |
| | | | CTAVNEAGTVSTSCYLAVQVSEEFE |
| | | | KETTAVAEKITTEEKRFVESRDVVM |
| | | | TDTSITEEHAGPGEPAAPFFITKPVVQ |
| | | | KLVEGGSIVFECQVGGNPKPHVYWK |
| | | | KSGVPLTSGYRYKVSYNKQTGECRL |
| | | | VISMTFADDAGEYTIVIRNKHGETSA |
| | | | SASLLEEADYESLMKSQQEMLYQTQ |
| | | | VTAFVQEPKVGEIAPGYVYSEYEKE |
| | | | YEKEQALIRKKMAKDTVMVRTFVE |
| | | | DQEFHISSFEERLIKEIEYRIIKTTLEEL |
| | | | LEEDGEEKMAVDISESEAIEAGFDLR |
| | | | VKNYRILEGMGVTFHCKMSGYPLPK |
| | | | IAWYKDGKRIKHGERYHMDFLQDG |
| | | | RASLRIPVVLPEDEGIYTAFASNMKG |
| | | | NAICSGKLYVEPAAPLSAPTYIPTPEP |
| | | | VSRIRSISPRSVSRSPIRMSPARMSPA |
| | | | RMSPGRRLEETDESQLERLYKPVFVL |
| | | | KPTSFKCVEGQTARFDLKVVGRPMP |
| | | | ETFWFHDGQQIVNDYTHKVVVKED |
| | | | GTQSLLIVPATPSDSGEWTVVAQNR |
| | | | AGKSSISVILTVEAVEHQVKPVFVEK |
| | | | LRNLNIKEGSRLEMKVRATGNPNPDI |
| | | | VWLKNSEIIVPHKYPKIRIEGTKGEA |
| | | | ALKIDSTVSQDSAWYTATAINKAGR |
| | | | DTTRCKVNVEVEFAEPEPERRLIIPRG |
| | | | TYRAKEIAAPELEPLHLRYGQEQWE |
| | | | EGDLYDKEKQQKPFFKKKLTSLRLK |
| | | | RFGPAHFECRLTPIGDPTMVVEWLH |
| | | | DGKPLEAANRLRMINEFGYCSLDYA |
| | | | VAYSRDSGVITCRATNKYGTDHTSA |
| | | | TLIVKDEKSLVEESQLPEGRKGLQRI |
| | | | EELERMAHEGALTGVTTDQKEKQKP |
| | | | DIVLFPEPVRVLEGETARFRCRVTGY |
| | | | PQPKVNWYLNGQLIRKSKRFRVRYD |
| | | | GIHYLDIVDCKSYDTGEVKVTAENPE |
| | | | GVIDHKVKLEIQQREDFRSVLRRAPE |
| | | | PKPEFHVHEPGKLQFEVQKVDRPVD |
| | | | TTETKEIVRLKRAERITHEKVSEESEE |
| | | | LRSKFKRRTEEGYYEAITAVELKSRK |
| | | | KDESYEELLRKTKEELLHWTKELTE |
| | | | EEKKALAEEGKITIPTFKPDKIELSPS |
| | | | MEAPKIFERIQSQTVGQGSDAHFRVR |
| | | | VVGKPDPECEWYKNGVKIERSDRIY |
| | | | WYWPEDNVCELVIRDVTAEDSASIM |
| | | | VKAINIAGETSSHAFLLVQAKQLITFT |
| | | | QELQDVVAKEKDTMATFECETSEPF |
| | | | VKVKWYKDGVEIHTGDKYRMHSDR |
| | | | KVHFLSVLMIDTSDAEDYSCVLVED |
| | | | ENVKTTAKLIVEGAVVEFVKELQDIE |
| | | | VPESFSGELECIITPENIEGKWYHKGV |
| | | | ELKSNGKYTITSRRGRQNLTVKDVT |
| | | | KEDQGEYSFVVDGKKTTCKLKMKP |
| | | | RPIAILQGLSDQKVCEGDIVQLEVKV |
| | | | SLENVEGVWMKDGEEVQPGDRVHI |
| | | | VIDKQSHMLLIEDMTKEDAGHYSFTI |
| | | | PSLGLSTHGRVSVYSVDVITPLKDVN |
| | | | VLEGTKAVLECKVSVPDVTSVKWYL |
| | | | NDEQIKPDDRVHAIVKGTKQRLVINR |
| | | | THASDEGPYKLVVGRVETSCDLSVE |
| | | | KIKIIRGLRDLTCTETQNVVLEVELSH |
| | | | SGIDVLWNFKDKEIKPSSKYKIEAHG |
| | | | KIYKLTVLNMMKDDEGEYTFYAGE |
| | | | NRTSGKLTVAGGAISKPLTDQTVAES |
| | | | QEAVFECEVANPDSEGEWLKDGKHL |
| | | | PLSKTIRSESDGRKRRLIIAATKLDDI |
| | | | GEYTYKVATSKTSAKLKVEAVKIKK |
| | | | TLKNLTVTETQDAVFTVELTHPNVK |
| | | | GVQWIRNGVVLESSDKYTVSVKGTV |
| | | | YSLRIKNCAVADESVYGFKLGKLGA |
| | | | SARLHVETVKIIKKPKDVTALENATV |
| | | | SFEVSVSHDTVPVKWFHKNVEIKPSD |
| | | | KHRLVSERKVHKLMLQHISPSDAGE |
| | | | YTAVVGQLECKAKLFVETLHITKTM |
| | | | KNIEVPETKTASFECEVSHFNVPSMW |
| | | | LKNGVEIEMSEKFKIVVQGKLHQLII |
| | | | MNTSTEDSAEYTFVCGNDQVSATLK |
| | | | VTPIMITSMLKDINAEEKDTITFEVTV |
| | | | NYEGISYKWLKNGVEIKSTDRCQMR |
| | | | TKKLTHSLNIRNVHFGDAAEYTFVA |
| | | | GKATSTATLYVEARHIEFRKHIKDIK |
| | | | VLEKKRAMFECEVSEPDITVQWMKD |
| | | | GQELQLVDRIKIQKEKYVHRLLIPST |
| | | | RMSDAGKYTVVAGGNMSSANLFVE |
| | | | GRDVRIRSIKREVQVIEKQRAVVEFE |
| | | | VNEDDVDAHWYKDGIEINFQVQERH |
| | | | QYVVERRIHRMFISETRHSDAGEYTF |
| | | | VAGRNRSSVTLYVNAPEPPQILQELQ |
| | | | PITVQSGKPARFCAVISGRPQPKISWY |
| | | | KEEQLLSTGFKCKFLHDGQEYTLLLI |
| | | | EAFPEDAAVYTCEARNDYGVATTSA |
| | | | SLSVEVPEVVSPDQEMPVYPPAIVSP |
| | | | LQDAVTSEGRPAHFQCRVSGTDLKV |
| | | | SWYSKDKKIKPSRFFKMTQFEDTYQ |
| | | | LEVAEAFPEDEGIYTFVASNAVGQVS |
| | | | STATLRLEAPEAMLHEQIEMEMKEFS |
| | | | ISLLSGKEERPQTSSWDLQLFDINETL |
| | | | EPLSEPSVYSPKFDSKKEGNAPVFIKE |
| | | | VSNAEISIGDVAKLFVTVTGIPTPQIQ |
| | | | WFFNGAMLTPSADYKFVFDGNDHSL |
| | | | IILFTKLEDEGEYTCIASNEYGQAMC |
| | | | SAYLKINSEAEGHEEPESAEKSLEKL |
| | | | QGPCPPYFLKELKPVHCVQGLPAIFE |
| | | | YVVLGEPAPTVLWFKENKQLCTNVY |
| | | | YTIIHNPDGSGTFIVNDPQKEDGGLY |
| | | | VCKAENVWGGSTCAAELFVLLEDTD |
| | | | MTDATCKAAPTPEAPEGFPHTSVKD |
| | | | PAVETFDSEQEVVTFVKDAILKASLI |
| | | | AEEKQQFSYEHVVKTNELSSQVTLK |
| | | | AEQLQSTVILEHDMPTPESTRELLSIS |
| | | | GTIHVQPIKELPPSLQLQIAQSQDTLP |
| | | | REDTLMCQEPESQVVLSDTEKIFPSF |
| | | | MSIEEISLSTVESLQTLLAEPEESYPQP |
| | | | LIKETPAHSYPTSVAEEVLLSKDKTV |
| | | | SAVDRGQRETSQKQESQNALFLNQN |
| | | | LAEGHAQSLQGPDVTVSRVSSEHTC |
| | | | TESEILMESVDQLDSAGQDFAARIEE |
| | | | GQSLRFPLACEEKQVLLKEEHSDTLA |
| | | | LPLNQTTEYKKEPMAVNGVQEVQGS |
| | | | DFLSKESLLPGIPEEQRLNLKTQIRSA |
| | | | LQAAVASEQLSLFSEWLRNIEQVEV |
| | | | KAIDFTQEPNCIMCTYLITSVKSLTEE |
| | | | VTVTIKGIDPQMADLKTELKEALCSI |
| | | | CEEMNILTAEEPGIEKGATVVLQEDV |
| | | | SFSSSQKLEAITEPEAESKYLVSKEEIS |
| | | | YFKVESQVKAVGTTTASAAVSDEKQ |
| | | | DELPKPSEEKEKVSEGGTEEVGTVEI |
| | | | QEAEDEEDRKLGEDGPDVQTPLVDT |
| | | | IAEEGDIISLTSCITNAKEVNWYFESK |
| | | | LVPSDEKFKCLQDQNTYTLVIDKVN |
| | | | REEHQGEYTCEALNDNGKATTSAKL |
| | | | TVVKRAAPVIRRRIEPLEVALGHLAK |
| | | | FTCEIHSAPNVRFQWFKAGREIYESD |
| | | | KCSIRSANYVTTLEILRTQVVDCGEY |
| | | | TCKASNEYGSVSCTATLTVTEAYPPT |
| | | | FFSRPKSVTTFVGKAAKFLCTVTGTP |
| | | | VIETIWQKDGMALSPSPTCKISDVDN |
| | | | KHILELSNLTVHDKGVYSCKASNKF |
| | | | GADTCQAELDIIDKPHFIKELEPVQSA |
| | | | INKKIHLEGQVDEDRKVTITWSKNG |
| | | | QKLPPGKDYKIYFEDKIASLEIPLAKL |
| | | | KDSGTYVCTASNEAGSSSTSATVTIR |
| | | | EPPSFVKKVDPSYLMLPGESARLHCR |
| | | | LKGSPVIQVTWFKNNKELTESNTIRM |
| | | | SFVNSEAVLDITDVKVEDSGTYSCEA |
| | | | VNDVGSDSCSAEIVVKEPPSFIKTLEP |
| | | | ADIVRGTNALLQCEIAGTGPFEISWF |
| | | | KDKKQIRSSKKYRLFSQKSTVSLEIFS |
| | | | FNSADVGDYECVVANEVGKCGCVA |
| | | | THLLKVEPPTFVKKVDDFTALAGQT |
| | | | VTLQAAVRGSEPISVTWMKGQEIIKE |
| | | | DGKIKMSFANGVAVLIIPDVQISFGD |
| | | | KYTCLAENEAGSQTSVGELIVKEPAK |
| | | | IIERAELIQVTAGDPATLEYTVAGTPE |
| | | | LKPKWYKDGRPLVASKKYRISFKNN |
| | | | VAQLKFYSAELHDSGQYTFEISNEVG |
| | | | SSSCETTFTVLDRDIAPFFTKPLRNVD |
| | | | SVVSGTCRLDCKIAGSLPMRVSWFK |
| | | | DGKEVTSSDRYRIAFVEGTASLEISR |
| | | | VDMSDAGNFTCRATNSVGSKDCSG |
| | | | ALIVQEPPSFVTKPASKDILPGSAVFL |
| | | | KSTFQGSTPFTIRWFKGDKELVSGGN |
| | | | CYINKEALESSLELYSVKTTDSGTYT |
| | | | CKVSNVAGAVECSANLFVKEPATFV |
| | | | ERLELSQLLKKGDTTQLACKVTGTPP |
| | | | IKITWFANDREIKESSKHKMSFVEST |
| | | | AVLRLTDIAVEDSGEYMCEAQNEAG |
| | | | SDHCSSILIVKESPYFTKEFKPIEVLKE |
| | | | YDVMLLAEVAGTPPFEITWFKDNTT |
| | | | LRSGRKYKTFIQDRLVSLQILKFVAA |
| | | | DVGKYQCRVTNEVGSSTCSARVTLR |
| | | | EPPTFVKKIESTSSLRGGTAAFQATL |
| | | | KGSLPITVTWLKDNEEITEDDNIRMT |
| | | | FENNVASLYLSGIEVKHDGKYVCQA |
| | | | KNDAGIQRCFAVLSVKEPATIIEEAV |
| | | | SIDVTQGDPATLQVKFSGTKEITAKW |
| | | | FKDGQELTLGQKYKISVTDTVSILKII |
| | | | STEKRDSGEYTFEVQNDVGRSSCKA |
| | | | SINVLDLIIPPSFTKKLKKMDSIKGSSI |
| | | | DLECIVAGSHPISIQWFKDDQEITASE |
| | | | KYKFSFHDNTAFLEISQLEGSDSGTY |
| | | | TCSATNKAGHNQCSGHLTVKEPPYF |
| | | | LEKPQSQDVNPNTRVQLKALVGGTA |
| | | | PMTIKWFKDNKELHSGAARSVWKD |
| | | | DTSTILELFSAKAADSGTYICQLSND |
| | | | VGTATTKASLFVKEPPQFIKKPSPVL |
| | | | VLRNGQSTTFECQITGTPEIRVSWYL |
| | | | DGNEITAVEKHGISFIDGLATFQISGA |
| | | | RVENSGTYVCEAQNDAGTASCSIEL |
| | | | KVKEPPTFIRELKPVEVVKDSDVELE |
| | | | CEVMGTSPFQVTWLRNNKEIRSSKK |
| | | | YTLTDRVSVFNLNINRCDPSDTGDY |
| | | | QCIVSNEGGSCSCSARVSLKEPPSFIK |
| | | | KIENITTVLKSSATFQSTVAGSPPISIT |
| | | | WLKDDQILDEDDNVHISFVNNVATL |
| | | | QIRSVDNGHSGRYTCQAKNESGVER |
| | | | CYAFLLVQEPAQIIEKAKSVDVTERD |
| | | | PVTLECVVAGTPELKVKWLKDGKQI |
| | | | VPSRYFSMSFENNVASFRIQSVMKQ |
| | | | DSGEYTFKVENDFGSSSCDAYLRVL |
| | | | DQNIPPSFTKKLTKMDKVLGSSIHME |
| | | | CKVSGSLPISAQWFKDGKEISTSAKY |
| | | | RLVCHENTVSLDVNNLELEDTANYT |
| | | | CRVSNVAGDAACSGILTVKEPPSFLV |
| | | | KPERQQAIPDSTVEFKAVLKGTPPFKI |
| | | | KWFKDDVELASGPKCFIGLEGSTSFL |
| | | | NLYSVDASKTGQYTCQVTNDVGSDS |
| | | | CTTTLLVTEPPKFVKKLEATKIVKAG |
| | | | DSARLECKITGSPDIRVVWYRNEHEL |
| | | | PASDKYRMAFIDSVAVLQMNYLGTE |
| | | | DTGDFICEAQNPAGSTSCSTKVIVKE |
| | | | PPVFSSFPPVVETLKNAEVSIECELSG |
| | | | TPPFEVVWYKDKRQLRSSKKYKIAS |
| | | | KNFHASIHILNVDTLDIGEYHCKAQN |
| | | | EVGSDTCICIVKLKEPPRFVSKLNSLT |
| | | | VVAGEPAELQASIEGTQPISVQWLKE |
| | | | KEEVVRESENIRITFVENVATLQFSK |
| | | | AEPANAGKYICQIKNDGGMRENMA |
| | | | TLSFISEPAVIVEKAGSMTVTVGETC |
| | | | TLECKVAGTPELSVEWYKDGKLLTS |
| | | | SQKHKFSFYNKISSLKILSVEKQDAG |
| | | | TYTFQVQNNVGKSSCTAVVDVSDR |
| | | | MVPPSFTRRLKDTIGVLGTSCILECK |
| | | | VAGSSPISVAWFHGKTKIVSGAKYQ |
| | | | TTFSDNVCTLQLNSLDSSDMGSYTC |
| | | | VAANVAGSDECRAVLAVQEPPSFVK |
| | | | EPEPLEVLPGKNITFTSVIRGTPPFKV |
| | | | GWFRGARELVKGDRCNIYFEDTVAE |
| | | | LELFNVDISQSGEYTCVVSNNAGQTS |
| | | | CTTRLFVKEPAVFVKKLSDHSVEPG |
| | | | KSIILESTYKGTLPISVTWKKDGFNIT |
| | | | PSEKCSIVTTEKTCILEILNSTKRDAG |
| | | | RYSCEIENEAGRDVCEALVSTLEPPY |
| | | | FVTELEPLEASVGDSVSLQCQVAGSP |
| | | | EITVSWYKGDTKLRPTPEYRTYFTNN |
| | | | VATLVFNKVNINDSGEYTCKAENSIG |
| | | | TASSKTVFRIQERQLPPSFARQLKDIE |
| | | | QTVGLPVTLTCRLNGSAPIQVSWYR |
| | | | DGVLLRDDENLQTSFVDNVATLKIL |
| | | | QTDLSHSGQYSCSASNPLGTASSSAR |
| | | | LTAREPKKSPFFDIKPVSIDIIAGESAD |
| | | | FECHVTGAQPMRITWSKDNKEIRPG |
| | | | GNYTITCVGNTPHLRILKVGKGDSG |
| | | | QYTCQATNDVGKDMCSAQLSVKEP |
| | | | PKFVKKLEASKVAKQGESIHLECKIS |
| | | | GSPEIKVSWFRNDSELHESWKYNMS |
| | | | FVDSVAVLTINEASAEDSGDYICEAH |
| | | | NGVGDASCSTALTIKAPPVFTQKPSPI |
| | | | GALKGSDVVFQCEISGTPPFEVVWV |
| | | | KDRKQVRSSKKFKITSKNFDASLHIL |
| | | | NLEAADVGEYYCKATNEVGSDTCV |
| | | | CTLKFKVEPPRFVKKLSDTSTLVGDA |
| | | | VELRAVVEGFQPISVVWLKDKGDVI |
| | | | RESENTRISFVDNVATLQLGSPEASD |
| | | | SGKYVCQIKNDAGMRECSAILTVLEP |
| | | | ARIIEKPEPMTVTTGNAFALECVVTG |
| | | | TPELSAKWFKDGREIAADSKHHITFV |
| | | | NKVASLKIPCAEMSDKGLYSFEVKN |
| | | | SVGKSTCTVSVHVSDRIVAPSFIRKL |
| | | | KDINAIVGASVVLECRVSGSAPISVG |
| | | | WFQDGNEIVSGPKCQSSFSENVCTLN |
| | | | LSFLEPSDTGTYTCVAANVAGSDECS |
| | | | AVLTIQEPPSFEQTPDSVEVLPGTSLT |
| | | | FTSVIRGTPPFKVKWFKGSRELVSGE |
| | | | SCSISLEDFVTELELFEVEPLQSGDYS |
| | | | CLVTNDAGSASCTAHLFVKEPATFV |
| | | | KRLADFSVETGSPIVLEATFTGTPPIS |
| | | | VSWMKNEFALTQSQNCSITMTEKSTI |
| | | | LEILDSTIEDYAQYSCLIENEAGQDIC |
| | | | DAVVSVLEPPYFIEPLEHVEAVIGEPI |
| | | | TLQCKVDGTPEIRISWYKEHTKLRSA |
| | | | PAYKMQFKNNVASLVINKVDHSDV |
| | | | GEYTCKAENIVGAVASSSVLVIKERK |
| | | | LPPSFARKLKDVQETLGFPVAFECRI |
| | | | NGSEPLQVSWYKDGVLLKDDANLQ |
| | | | TSFVHNVATLQILQTDQSHVGQYNC |
| | | | SASNPLGTASSSAKLVLLEHEVPPFF |
| | | | DLKPVSVDLALGESGSFKCHVTGTA |
| | | | PMKITWAKDNREIRPGGNYKMTLVE |
| | | | NTATLTVLKIGKGDAGQYTCYASNV |
| | | | AGKDSCSAHLGVQASIEPPRFIKKLE |
| | | | PSRIVKQDESTRYECKIGGSPEIKVL |
| | | | WYKGETEIQESSKFRMSFVDSVAVL |
| | | | EMHGLSVEDSGDYTCEACNAAGSAS |
| | | | STTSLKVKALEPPIFRKKPHPVETLK |
| | | | GADVHLECELQGTPPFQVSWHKDKR |
| | | | ELRSGKKYKIMSENFLTSIHILSVDAA |
| | | | DVGEYQCKATNDVGSDTCVGSITLK |
| | | | APPRFVKKPSDVSTIVGEEVQLQATV |
| | | | EGAEPISVVWFKDKGEIVRESDNIWI |
| | | | SYSENTATLQFSRAETANAGKYTCQI |
| | | | KNDAGMQECSATVSILEPAAIVEKPE |
| | | | SITVTTGDTCTLECSVTGTPELTTKW |
| | | | FKDGKELTSDNKYKISFFNKVSGLKII |
| | | | NVAPSDSGVYSFEVQNPVGKDSCTA |
| | | | SVQVSDSDRIVPPSFTRRLKETNGLS |
| | | | GSSVVMECKVYGSPPISVSWFHERN |
| | | | EISSGRKYQTTLTDNTCALTVNMLEE |
| | | | SDAGNYTCIATNVAGSDECSAPLTV |
| | | | REPPSFVQKPDPMDVLTGTNVTFTSI |
| | | | VKGTPPFSVSWFKGSTELVPGDTCN |
| | | | VSLEDSVAELELFDVDTSQSGEYTCI |
| | | | VTNEAGKVSCTTHLYVKAPARFVKK |
| | | | LNDYSIEKGKPLILEGTYTGTPPISVT |
| | | | WKKNGINVTPSQRCNITTTERSAILEI |
| | | | PSSTVEDAGQYNCYIENTSGKDSCSA |
| | | | QILILEPPYFVRQLEPVKVTVGDSASL |
| | | | QCQLGGTPEIAVSWFKGDTKLRPTA |
| | | | TYKMHFRNNIATLVFNQVDSNDSGE |
| | | | YICRAENSVGEVSSSTFLTVQEQKLP |
| | | | PSFSRQLRDVQETVGLPVVFECAVSG |
| | | | SEPISVSWFKDGRPVKDSPNIQASFL |
| | | | DNVATLNIFQTDRSFAGQYSCTATNP |
| | | | IGSASSSARLILTEGKNPPFFDIPLAPV |
| | | | DAVVGESADFECHVTGTQPIKVAWA |
| | | | KDNREIRSGGNYQISYLENSAHLTIL |
| | | | KVDKGDSGQYTCYAVNEVGKDSCT |
| | | | AQLNIKERLIPPSFTKKLSETVEETEG |
| | | | NSFKLEGRVAGSQPISVAWYKNNIEI |
| | | | HPTSNCEITFKNNTLLLQIKRAGMDD |
| | | | AGLYTCKVSNDAGSALCTSSIVIKEP |
| | | | KKPPVFDQHLTPVTASEGEFVQLSCH |
| | | | VWGSEPIRIQWLKAGREIKPSDRCSF |
| | | | SFANGTAVLELKDVTKADAGDYVC |
| | | | KASNVAGSDTSKSKVTIKDKPAAVP |
| | | | AAKKAAVDGKLFFVSEPQSIRVVEK |
| | | | TTATFIAKVGGDPIPNVKWTKGKWR |
| | | | QLNQGGRILIHQKGDEAKLEIRDTTK |
| | | | TDSGLYRCVAFNKHGEIESNVNLQV |
| | | | DERKKQEKIEGDLRAMLKKTPVLKK |
| | | | GAGEEEEIDIMELLKNVDPKEYEKY |
| | | | ARMYGITDFRGLLQAFELLKQTEGE |
| | | | ETHRLEIEEIEKSEKDEKEFEELVSFIQ |
| | | | QRLSQTEPVTLIKDIENQTVLKDNDA |
| | | | VFEIDIKINYPEIKLSWYKGTEKLEPS |
| | | | DKFEISIDGDRHTLRVKNCQLKDQG |
| | | | NYRLVCGPHIASAKLTVIATEPAWER |
| | | | HLQDVTLKEGQTCTMTCQFSVPNVR |
| | | | SEWFRNGRILKPQGRYKTEVEHKVH |
| | | | KLTIADVRAEDQGRYTCKHEDLETS |
| | | | AELRIEAEPIQFTKRIQNIVVSEHQSA |
| | | | TFECEVSFDDAIVTWYKGPTELTESQ |
| | | | KYNFRNDGRCHYMTIHNVTPDDEG |
| | | | VYSVIARLEPRGEARSTAELYLTTKEI |
| | | | KLEMKPPDIPDSRVPIPTMPIRAIPPEE |
| | | | IPPTAVPPIPLLLPLPEEKKPPEKRVEV |
| | | | TKKAVKKDAKKVVAKPKEEAPPPK |
| | | | VIEVPKKPPRPTALIPAEAPEIIDVSSK |
| | | | AEEVKITTITRKKEVQKEKEAVYERK |
| | | | QAVYEEKKVYIESLEEPYDELEVETY |
| | | | TEPYEEPYYEEPEEDYEETQVEAKRE |
| | | | VHEEWEEDFEEGQEYYEREEGYDEG |
| | | | EEEWEETYQEREVVQVQKEVYEESR |
| | | | ERKIPAKVPEKKELPPPKVVKKPVVE |
| | | | KIEKTSRRMEEEKVQVTKVPEVSKKI |
| | | | VPQKPSRTPVQEEIIEVKVPAVHTKK |
| | | | MVISEEKMFFAAHTEEEEEVSVTVPE |
| | | | VQKKTVTEEKVHVAVSKKIEPPPKV |
| | | | PEPPKKPEEVVPVPVPKKVEPPPAKV |
| | | | PEVPKKPVPEEKKPVPVPKKEPAAPP |
| | | | KVPEVPKKPVPEEKVPVPIAKKKEAP |
| | | | PAKVPEVQKRVVTEEKITIVTEREESP |
| | | | PPAVPEIPKKKLPEEKRPVPRKEEEVP |
| | | | PPKVPAVPKKPVPEEKVPVPVPVAK |
| | | | KAPPPRAEVSKKMVMEEKRFAAEEK |
| | | | LSVTVPQRVEVMRHEVSAEKEWRYS |
| | | | EEEERVSVSVYREEEREEEEVEVTEY |
| | | | EVMEEPEEYIVEEEEHFISEEVEAEPA |
| | | | EESFQVPEKKIIPKPKIPAKVEEPPPA |
| | | | KVPEAPKKIVPEKKIPAAVPKKEKVP |
| | | | PTKVPEEPKKPVPEKRAPPKVAKIEE |
| | | | PPPTKVTERHMQITQEEKVHVAVTK |
| | | | KVEPPRPKVPEEPKRAVPEEKFPKLK |
| | | | PRKEEEPPAKVTELRKRAVKEEKVSI |
| | | | EVAKREPPAAKEVTVTAEKEWAYT |
| | | | KEEEAVSVEREEEYEEYEEYDYKEFE |
| | | | EYEPTEEYDQYEEYEEREFEHYEEYK |
| | | | EHEEYVTEPEKPVPVKPIQEEPVPTKP |
| | | | KAPPAKVPKKVIPEEKVPVPIPKKLK |
| | | | PPPPKAREEAKKVVEEKIQISVIKREK |
| | | | EQVTEPAAKVPMKPKRVVTEEKVPV |
| | | | PKKEVAAPVRVPEVPKKEEPEEIAFE |
| | | | EEVVTHEEEYYEEEEEEEEYIHEEEEI |
| | | | ITEEEVVPVKVFKVPEVPKKPVPEEK |
| | | | KPVPVPKKKEAPPAKVPEIPKKPEEK |
| | | | VPVPVPKKEKAPPAKVPEVPKKPVPE |
| | | | EKVPVPEEKVPVPVPKKVEAPPAKV |
| | | | PEVPKKPVPEKKVPVPAPKKVEAPPA |
| | | | KVPEVPKKVLPEEKKPTPIRKKVEPP |
| | | | PPKVPKKREPVPVPIPAALLREEKVV |
| | | | HKEEIVVEEEEVLPEEEEISPEEEVPL |
| | | | EEEEEEEEVLPEEEEVPPEEEEVPPEE |
| | | | EEVPPEEEEFVPEEEVVPEKEEVLPEI |
| | | | KPKVPVPARVPEVKKKVPEKKVIIPK |
| | | | KEEVPPAKVPEVPKKVEEKRIIVPEEE |
| | | | EVPPVEVFEEPEEPIPEEEIPEEAPIVE |
| | | | EVEEEAPPRVPEVVKKAVPEAPTPVP |
| | | | KKVEVPPAKVPKKVPEEKPPVPVQK |
| | | | KEAPPAKVPEVPKKVPEKKVPVPKK |
| | | | EVVPPAKGRAVLEEKVSVAFHKEEV |
| | | | VEERTELEIVEAQEEALEEEFHEVEE |
| | | | YFEEEEFHEVEEFLKVEKYRAEEEVH |
| | | | RAEEVHRVIEVLEAEEEEAYEKPKAP |
| | | | PKGPEISEKVIPPKKPPTKVVPRKEPP |
| | | | AKVPEVPKKIVVEEKVHVPEEPKVA |
| | | | PAKVPEAPKEVVPEKKVPAAPPKKP |
| | | | EVPPVTVPEAPKEVVPEKKVPVVPPK |
| | | | KPEVPPAKVPEVPKAAVPEKKVPEAI |
| | | | PPKPESPPPAVPEAPKEVVPEKKVPV |
| | | | MPPKKPEVPPAKVPEAPKEVVPEKK |
| | | | VPVMPPKKPEVPPAKVPEVPKAAVP |
| | | | EKKVPEAIPPKPESPPPAVYEEPEEIA |
| | | | PEEPPVEVVEEPEPVPAPPPKVTVPPK |
| | | | KPVPEKKPPAVVAKKPEPPPAKVPEV |
| | | | PKEVVPEKKVPPVVPKKPEVPPPKVP |
| | | | EVPKEVVPEKKVAVPKKPEVPPAKV |
| | | | PEVPKKPVLEEKPAIPIPEKVESPPPEE |
| | | | EEEPVPVVEEEEPVPVVEEEEPVPVV |
| | | | EEVEPEAPPPAVPEEPKKIVPEKKVP |
| | | | VIKKPEPPPPKEPEPEKKVIEKPKLKP |
| | | | RPPAPPPAPPKEDVKEKIFQLKAVSK |
| | | | KKVPEKPAVPEKVELTPLKVAGGEK |
| | | | KVRKLLPEPKPQPKEEVILKSVLRKR |
| | | | PEEEEPKVEPKKVEKIKKPAVPEPPP |
| | | | KAVEEVEAPPAVTKKERKIPEPTKVP |
| | | | EIKPPIPLPAPEPKPKPEAEVKIIKPPP |
| | | | VEPPPTPIAAPVTVPVVGKKAEAKAP |
| | | | KEEAAKPKGPIKGVAKKTPSPIEAER |
| | | | KKLRPGSGGEKPPDEAPFTYQLKAV |
| | | | PLKFVKEIKDIVLTEAESVGSSAIFEC |
| | | | LVSPSTAVTSWMKDGSNIRESPKHRF |
| | | | IADGKDRKLHIIDVQLSDAGEYTCVL |
| | | | RLGNKEKTSTAKLIVEELPVRFVKTL |
| | | | EEEVTVVKGQPLYLSCELNKERDVV |
| | | | WRKDGKIVVEKPGKIVPGVIGLLRAL |
| | | | TINDADDSDAGTYTVTVENANNLEC |
| | | | SSCVKVVEVIRDWLVKPIRDQHVKP |
| | | | KGTAVFTCVIAKDTPNIKWYKGYDE |
| | | | IPWEPTDKTEIIRDGNHIHLKVKNAM |
| | | | PEDIDEYAVEIEGKRYPAKLTLGERE |
| | | | VELLKPIEDVTIYEKESASFDAEISEV |
| | | | DVPGQWKLKGELLRPSPTCEIKAED |
| | | | GKRFLTLHNVKLDQAGEVLYQALN |
| | | | AVTTAILTVKEIELDFAVPLKDVTVP |
| | | | EKRQARFECVLTREANVIWSKGPDII |
| | | | KSSDKFDIITDGKKHILVINNSQFDDE |
| | | | GVYTAEVEGKKTSARLFVTGIRLKFI |
| | | | SPLEDQTVKEGETATFVCELSHEKM |
| | | | HVVWFKNDAKLHTSRTVLISSEGKT |
| | | | HKLEMREVTMDDISQIKAQVKDLSS |
| | | | TANLKVIEADPYFTVKLHDKTGVEK |
| | | | DEIVLRCEVSKDVPVKWFKDGEELL |
| | | | PSPKHSIKADGLRRILKIKKADLKDK |
| | | | GEYVCDCGTDTTKANVTVEARLIKV |
| | | | EKPLYGVEVFVGETARFEIELSEPDV |
| | | | HGQWKLKGEPLTASPDCEIIEDGKK |
| | | | HILVLYNCRLDMTGKVSFQAANAKS |
| | | | AANLKVKELPLIFITPLSDVKVFEKD |
| | | | EAKFECEVSREPKTYRWLKGTQEITG |
| | | | DDRIELIKDGTKHSLVIKSAAFEDEA |
| | | | KYIFEAEDQHTSGKLIIEGIRLKFLTPL |
| | | | KDVTAKERESAVFTVELSHDNIRVR |
| | | | WFKNDQRLHTSKFVSMDDEGKTHSI |
| | | | TFRNLSIDDTSQIKVEAMGLSSEAKL |
| | | | TVLEGDPYFTGKLQDYTGVEKEEVIL |
| | | | QCEISKADAPVKWFKDGQEIKPSKN |
| | | | AVIKADGKKRMLILKKPLKSDIGQYT |
| | | | CDCGTDKTSGKLNIEDREIKLVRPLY |
| | | | SVEVMETETARFETEISEDDIHANWK |
| | | | LKGEALLQTPECEIKEEGKTHFLILH |
| | | | NCRLDQTGGVDFQAANVKSSAHLR |
| | | | VKPRVIGLLRPLKDITVTAGETATFD |
| | | | CELSYEDIPVEWYLRGKKLEPSDKV |
| | | | VMRSEGRVHTLTLRDVKLEDAGEV |
| | | | QLVAKDFKTQAKLFVKEPPVEFTKP |
| | | | LEDQTVEEEATAVLECEVSRENAKV |
| | | | KWFKNGTEILKSKKYEIVADGRVRK |
| | | | LIIHGCTPEDIKTYTCDAKDFKTSCNL |
| | | | NVVPPHVEFLRPLTDLRVKEKEMAR |
| | | | FECEISRENAKVHWFKDGAEIKKGK |
| | | | KYDIISKGAVRILVINKCLLDDEAEYS |
| | | | CEVRTARTSGMLTVLEEEAVFTKNL |
| | | | ANIEVSETDTVKLVCEVSKPGAEVT |
| | | | WYKGDEEIIETGRYEILTDGRKRILII |
| | | | QNAHLEDAGNYNCRLPSSRTDGKVK |
| | | | VHELAAEFISKPQNLEILEGEKAEFV |
| | | | CSISKENFEVQWKRDDKTLESGDKY |
| | | | DVIADGKKRVLVVKDATLQDMGTY |
| | | | VVMVGAARAAAHLTVIEKLRIIVPLK |
| | | | DTRVKEQQEVVFNCEVNTEGAKAK |
| | | | WFRNDEAIFDSSKYIILQKDLVYTLRI |
| | | | RNAQLDDQANYNVSLTNHRGENVK |
| | | | SAANLIVEEEDLRIIEPLKDIETMEKK |
| | | | SVTFWCKVNRLNVTLKWTKNGEEV |
| | | | AFDNRVLYRIDKYKHSLIIKDCGFPD |
| | | | EGEYVVTAGQDKSVAELLIIEAPTEF |
| | | | VEHLEDQTVTEFDDAVFSCQLSREK |
| | | | ANVKWYRNGREIKEGKKYKFEKDG |
| | | | SIHRLIIKDCRLDDECEYACGVDDRK |
| | | | SRARLFVEEIPVEIIRPPQDILEAPGAD |
| | | | VVFLAELNKDKVEVQWLKNNMIIVQ |
| | | | GDKHQMMSEGKIHRLQICDIKPRDQ |
| | | | GEYRFIAKDKEARAKLELAAAPKIKT |
| | | | ADQDLVVDVGQPLTMVVPYDAFPK |
| | | | AEAEWFKENEPLSSKTVDTTAEQTSF |
| | | | RILKAKKEDKGRYKVVLQNKHGKA |
| | | | EGFINLKVIDVPGPVRNLEVTETFDG |
| | | | EVSLAWEEPLTDGGSKIIGYVVERRD |
| | | | IKRKTWVLATDRADSCEFTVTGLQK |
| | | | GGVEYLFRVSARNRVGTGEPVETDS |
| | | | PVEARSKYDVPGPPLNVTVTDVNRF |
| | | | GVSLTWEPPEYDGGAEITNYVIELRD |
| | | | KTSIRWETAMTVRAEDLSATVTDVV |
| | | | EGQEYSFRVRAQNRIGVGKPSAATPF |
| | | | IKVADPIERPSPPVNLNASDQTQSSV |
| | | | QLTWEPPLKDGGSPILGYIIERCEEGK |
| | | | DNWIRCNKKLVPELTYKVTGLQKGN |
| | | | KYLYRVSAENEAGVSDPSEILGPLTA |
| | | | DDADAEPTMDLSAFKDGLEVIVPNPI |
| | | | KILVPSTGYPRPTATWSFGDKVLEAG |
| | | | DRVKMKTLSAYAELVISPSERPDKGI |
| | | | YTLKLENRAKAISGEIDVNVIARPSA |
| | | | PRELKFGDITKDSVHLTWEPPEDDGG |
| | | | SPLTGYVIEKREVSRKTWTKVIDSVT |
| | | | DLEFTVPDLLQGKEYLFKVCACNKC |
| | | | GPGEPAYVDEPVNMSAPATVPDPPE |
| | | | NVKWRDRTAKSIFLTWDPPKHDGGS |
| | | | RIKGYIVEKCPRGSDRWVACGEPVA |
| | | | DTKMEVTGLEEGQWYAYRVKALNR |
| | | | LGASKPSKPTEEIQAIDTQEAPEIFLD |
| | | | VKLLAGITVKAGTKIELPATVTGKPE |
| | | | PKITWTKADMLLKQDKRITIENVPKK |
| | | | STVTIMDSKRSDTGRYIIEAVNVCGR |
| | | | ATAVVEVNVLDKPGPPAAFDITDVT |
| | | | NESCLLTWNPPRDDGGSKITNYVVE |
| | | | RRATDSDMWHKLSSTVKDTKFKAT |
| | | | KLTPNKEYIFRVAAENMYGVGEPVQ |
| | | | ATPITAKFQFDPPGPPTRLEPSDITKD |
| | | | AVTLTWCEPDDDGGSPITGYWVERL |
| | | | DPESDKWVRCNKMPIKDTTYRVKGL |
| | | | TNKKKYRFRVLAENLAGPGKPSKST |
| | | | EPILIKDAIDPPWPPGKPVVKDIGRTS |
| | | | LMLNWTKPEHDGGAKIDSYVIEMLK |
| | | | TGTEDWVRVAEGVPTTQHLLPGLME |
| | | | GQEYSFRVRAVNKAGESEPSEPSDPV |
| | | | LCREKLYPPSPPRWLEVINITKNTAD |
| | | | LKWTVPEKDGGSPITNYIVEKRDVR |
| | | | RKGWQTVDTTVKDTKCTVTPLTEGS |
| | | | LYVFRVAAENAIGQSDYCEVEDSVL |
| | | | AKDTFTTPGPPYALAVVDVTKRHVD |
| | | | LKWEPPKNDGGRPIQRYVIEKKEKL |
| | | | GTRWVKAGKTSGPDCHFRVTDVIEG |
| | | | TEVQFQVRAENEAGVGHPSEPTEILK |
| | | | IEDPTSPPSPPLDLHVTDAGRKHIAIA |
| | | | WKPPEKNGGSPIIGYHVEMCPVGTE |
| | | | KWMRVNSRPIKDLKFKVEEGVVPDK |
| | | | EYVLRVRAVNAVGVSEPSEISENVV |
| | | | AKDPDCRPTIDLETHDIVVIEGEKLSI |
| | | | PVPFRAVPVPTVSWHKDGKEVKASD |
| | | | RLTMKNDHISAHLEVPKSVRADAGI |
| | | | YTVTLENKLGSATASINVKVIGLPGP |
| | | | CRDLKASDVTKSSCKLTWEPPEYDG |
| | | | GSPILHYVLERREAGRRTYIPVMSGE |
| | | | NKLSWTVKDLIPNGEYFFRVKAVNK |
| | | | IGGGEYIELKNPVIAQDPKQPPDPPV |
| | | | DVEVHNPTAEAMTITWKPPLYDGGS |
| | | | KIMGYIIEKIAKGEERWKRCNEHLVP |
| | | | VLTYTAKGLEEGKEYQFRVRAENAA |
| | | | GISEPSRATPPTKAVDPIDAPKVIMKT |
| | | | SLEVRRGDEIALDAIISGSPYPTITWL |
| | | | KDESIITPEEIKKRVEPLVRRRRGEVQ |
| | | | EEQPFVLPLTQRLSIDNSQKGESQLR |
| | | | VRDSVRPDHGLFMIKAENDHGIAKA |
| | | | PCTVCVLDIPGPPINFVFEDMRKTSV |
| | | | LCKWEPPLDDGGSEILNYTLEKKDK |
| | | | TKPDSEWMVVTSTLRHCKYSVTKLI |
| | | | EGKEYLFRVRAENRFGPGPPCVSKPF |
| | | | MAKDPFEPPDAPDKPIVEDVTSNSML |
| | | | VTWNEPKDNGSPILGYWLEKREVNS |
| | | | THWSRVNRNLLNSLKTKVDGLLEGL |
| | | | TYVFRVCAENAAGPGKFSPPSDPKT |
| | | | AQDPISPPGPPVPRVTDTSSTTIELAW |
| | | | EPPAFNGGGEIVGYYVYKQLVGTNE |
| | | | WSRCTEKMIKPREYTVREIREGADY |
| | | | KLRVTAVNVAGEGPPGETEPVTVAE |
| | | | PQAEPPTVELDVSVKGGIQIMAGKTL |
| | | | RIPAVVTGRPVPTKVWTIEEGELDKD |
| | | | RVEIENVGTKSELIIKNALRKDHGRY |
| | | | VITATNSCGSKFAAARVEVFDVPGPV |
| | | | LDLKPVVTNRKMCLLNWSDPEDDG |
| | | | GSEITGFIIERKDAKMHTWRQPIETER |
| | | | SKCDITGLLEGQEYMFRVIAKNKFGC |
| | | | GPPVEIGPILAVDPLGPPTSPERLTYT |
| | | | ERTKSTITLDWKEPRSNGGCPIQGYII |
| | | | EKRRHDKPDFERVNKHLCPTTSFLVE |
| | | | DLDEHQMYEFRVKAVNEIGESEPSLP |
| | | | LNVVIQDDEVPPTIKLRLSVRGDTIK |
| | | | VKAGEPVNIPADVTGLPMPKIEWSK |
| | | | NETVIEKPTDALKITKEEVSRSEAKTE |
| | | | LSIPKATREDKGTYTVTASNRLGSVF |
| | | | RNVHVEVYDRPSPPRNLAVTDIKAES |
| | | | CYLTWDAPLDNGGSEITHYIIDKRDA |
| | | | SRKRAEWEEVTNSAVERRYGIWKLI |
| | | | PNGQYEFRVRAVNKYGISDECKSDK |
| | | | VVIQDPYRTPGPPGKPKVLERTKGS |
| | | | MLVSWTPPLDNGGSPITGYWLEKRE |
| | | | EGGAYWSRVSRAPITKVGLKGVEFN |
| | | | VPRLIEGVKYQFRAMAINAAGVGPP |
| | | | SEPSDPEVAGDPIYPPGAPSRPEVKD |
| | | | KTKSSITEAWKPPAKDGGSPIKGYIV |
| | | | EMQEEGTTDWKSVNEPDKLLPTCEC |
| | | | VVPNLKELKKYRFRVKAVNEAGESE |
| | | | PSDTTGEIPATDIQEVPEVFIDIGAQD |
| | | | CLICQAGTQIRIPAVIKGRPTPKSSWE |
| | | | FDGKAKKAMKDGVHDIPEDAQLET |
| | | | AENSSVIIIPECKRSHSGKYSITAKNK |
| | | | AGQKTANCRVKVMDVPGPPKDLKV |
| | | | SDITRGSCRLSWKMPDDDGGDRIKG |
| | | | YVIEKRTIDGKAWTKVNPNCVSTSF |
| | | | VVPDLIAGQEYFFRVRAENRFGVGA |
| | | | PAETIQRTTARDPIYPPDPPIKLKIGLV |
| | | | TKNTVHLSWKPPKNDGGSPVTHYIV |
| | | | ECLAWDPTGTKKEAWRQCNKRDVE |
| | | | ELEFTVEDLIEGGEYEFRVKAVNAA |
| | | | GVSKPSATVGPVIVKDQTCPPAIELK |
| | | | EFMEVEEGTDVNIVAKIKGVPFPTLT |
| | | | WFKAPPKKPDNKEPIVYDTHVNKLV |
| | | | VDDTCTLVIPQSRRSDTALYTITAVN |
| | | | NLGTASKEMRLNVLGRPGPPVGPIKF |
| | | | ESISADQMTLSWLPPIDDGGSKITNY |
| | | | VIEKREANRKTWVRVSSEPKECTYTI |
| | | | PKLLEGHEYVFRIMAQNKYGIGEPLD |
| | | | SEPETARNLFSVPGAPDKPTVSSVTR |
| | | | NSMTVNWEEPEYDGGSPVTGYWLE |
| | | | MKDTTTKRWKRVNRDPIKAMTLGV |
| | | | SYKVTGLIEGSDYQFRVYAINAAGV |
| | | | GPASLPSDPATARDPIAPPGPPFPKVT |
| | | | DWTKSSADLEWSPPLKDGGSRVTGY |
| | | | IVEYKEEGKEEWEKAKDKEVRGTKL |
| | | | VVTGLKEGAFYKFRVRAVNIAGIGEP |
| | | | GEVTDAIEMKDRLELPDLQLDASVR |
| | | | DRIVVHAGGVIRIIAYVSGKPPPTVT |
| | | | WNMNERALPQEATIETTAISSSMVIK |
| | | | NCQRSHQGVYSLLAKNAAGERKKTI |
| | | | IVDVLDVPGPVGIPFLAHNLTNDSCK |
| | | | LTWFSPEDDGGSPITNYVIEKREADH |
| | | | RAWTPVTYTVTRHNATVQGLIQGKA |
| | | | YFFRIAAENSIGMGPFVETTDALVIR |
| | | | DPITVPERPEDLEVKEVTKESVTLTW |
| | | | NPPKYDGGSDIINYVLESRLIGTEKFH |
| | | | KVTSDNLMSRKYTVKGLKEGDTYE |
| | | | YRVSAVNIVGQGKPSFCTKPITCKDE |
| | | | LAPPTLDLDFRDKLTIRVGEAFALTG |
| | | | RYSGKPKPKVSWFKDEADVLEDDRT |
| | | | HIKTTPTTLALEKLKAKRSDSGKYSV |
| | | | VVENSTGSRKGVCQVNVVDRPGPPV |
| | | | GPVIFDEVTKDYMVISWKPPLDDGG |
| | | | SEITNYIIEKKEVGKDVWMPVTSASA |
| | | | KTTCKVSKLLEGKDYIFRIHAENLYG |
| | | | ISDPLVSDSMKAKDRFRVPDAPDQPI |
| | | | VTEVTKDSALVSWNPPHDGGKPITN |
| | | | YILEKRETMSKIWARVTKEPIHPYTK |
| | | | FRVPDLLEGCHYEFRVSAENEIGIGD |
| | | | PSPPSKPVFAKDPIAKPSPPVNPEAID |
| | | | TTCNSVDLTWQPPRRDGGSKILGYIV |
| | | | EYQKVGDEEWKRANHTPESCPETNY |
| | | | KVTGLRDGQSYKFRVIAVNAAGESD |
| | | | PAHVPEPVLVKDRLEPPELILDANMA |
| | | | REQHIRVGDTLRLSAIIKGVPFPKVT |
| | | | WKKEDRAAPTKARIDVTPVGSKLEI |
| | | | RNAAHEDGGIYSLTVENPAGSKTVS |
| | | | VKVLVLDKPGPPRDLEVSEIRKDSCY |
| | | | LTWKEPLDDGGSVITNYVVERKDVA |
| | | | STEWSPLSTTSKKKSHLAKHLNEGN |
| | | | QYVFRVAAENQYGRGPFVETPKPIK |
| | | | AVDPLHPPGPPKNLHHVDVDKTEVS |
| | | | LVWNKPDRDGGSPITGYLVEYQEEG |
| | | | TPDWIKFKTVTNLACVVTGLQQGKT |
| | | | YRFRVKAENIVGLGLPDTTIPIECQEK |
| | | | LVPPSVELDVKLIEGLVVKAGTTVRF |
| | | | PAIIRGVPIPTAKWTTDGNEIKTDEHY |
| | | | TVETDNFSSVLTIKNCLRKDTGEYQI |
| | | | TVSNAAGTKTVAVHLTVLDVPGPPT |
| | | | GPINILEVTPEYMTISWLPPKDDGGSP |
| | | | VINYIVEKKDTKKDTWGVVSSGSSK |
| | | | TKLKVPHLQKGYEYVFRVKAENKIG |
| | | | IGPPLDSVPTVAKHKFSPPSPPGKPVV |
| | | | TDITENAATVAWTLPKSDGGSPITGY |
| | | | YLERREVTGKWVRVNKTPLVDLKFR |
| | | | VTGLYEGNTYEFRVFAENLAGLSGP |
| | | | SPSSDPIKACRPIKPPGPPINPKLKDKT |
| | | | RESADLVWTKPLSDGGSPILGYVVE |
| | | | CQKAGTTQWDRINKDELIRQCAFRV |
| | | | PGLIEGNEYRFRIKAANIVGEGEPREL |
| | | | AESVIAKDILHPPEVELDVTCRDVITV |
| | | | RVGQTIRILARVKGRPEPDITWSKEG |
| | | | KALVRDKRVNIIHELPRVELQIKEAV |
| | | | RADHGKYIISAKNSSGHAQGFAIVNV |
| | | | LDRPGPCQNLKVTNVTKENCTISWE |
| | | | NPLDNGGSEITNFIVEYRKPNQKGWS |
| | | | IVASDVTKRLIKANLLANNEYYFRVC |
| | | | AENKVGVGPTIETKTPILAINPIDRPG |
| | | | EPENLHIADKGKTFVYLKWRRPDYD |
| | | | GGSPNLSYHVERRLKGAADWERVH |
| | | | KGSIKETHYMVDKCVENQIYEFRVQ |
| | | | TKNEGGESDWVKTEEVVVKEDLQK |
| | | | PVLDLKLSGVLTVKAGDTIRLEAGV |
| | | | RGKPFPEVSWTKDKDATDLTRSPRV |
| | | | KIDTSGDSSKFSLTKAKRSDGGKYV |
| | | | VTATNTAGSFVAFATVNVLDKPGPIR |
| | | | NLKITDVCSDRCSLRWDPPEDDGGC |
| | | | EIQNYILEKCESKRMVWSTFSSTILTP |
| | | | GTTVTRLIEGNEYIFRVRAENKIGTGP |
| | | | PTETKPVIAKTKYDKPGRPDPPEVTK |
| | | | VSKEEMTVVWAPPEYDGGKSITGYY |
| | | | LEKKEKHSTRWVPVNKSAIPERRLK |
| | | | VQNLLPGHEYQFRVKAENEVGIGEP |
| | | | SLPSRPVVAKDPIEPPGPPTNLKVVD |
| | | | TTKSSITLGWGKPVYDGGAPIIGYVV |
| | | | EMRPKKADMSPDEGWKRCNAAAQL |
| | | | VRMEFTVTSLDENQEYEFRVCAQNQ |
| | | | VGIGRPAELKDAIKPKEILEPPEIDLD |
| | | | ASMRKLVTVRAGCPIRLFAIVRGRPA |
| | | | PKVTWRKVGIDNVVRKGQVDLVDT |
| | | | MAFLVIPNSTRDDSGKYSLTLVNPAG |
| | | | EKAVFVNVRVLDTPGPVSDLKVSDV |
| | | | TKTSCHISWAPPENDGGSQVTHYIVE |
| | | | KREAERKTWATVTPEVKKTSFHVTN |
| | | | LVPGTEYFFRVTAVNEYGPGVPTDV |
| | | | PKPVLATDPLSEPDPPRKLEVTEMTK |
| | | | NSAVLAWLPPLRDGGAKIDGYIVSY |
| | | | REEEQPADRWTEYSVVKDLSLVVTG |
| | | | LKEGKKYKFRVAARNAVGVSLPREA |
| | | | EGVYEAKEQLLPPKILMPEQITIKAG |
| | | | KKLRIEAHVYGKPNPVCKWKKGED |
| | | | DVVTSSHLAVHKAENSSVLIIKDVTR |
| | | | KDSGYYSLTAENSSGTDTQKIKVIVM |
| | | | DAPGPPQPPFDISDIDADACSLSWHIP |
| | | | LEDGGSNITNYIVEKCDVSRGDWVT |
| | | | ALASVTKTSCRVGKLIPGQEYIFRVR |
| | | | AENRFGISEPLTSPKMVAKFPFGVPS |
| | | | EPKNARVTKVNKDCIFVAWDRPDSD |
| | | | GGSPITGYLIERKERNSLLWVKANDT |
| | | | PVRSTEYPCAGLVEGLEYSFRIYALN |
| | | | KAGSSPPSKPTEYVTARTPVDPPGKP |
| | | | EVIDVSKSTVSLVWARPKHDGGSKII |
| | | | GYFVEACKLPGDQWIRCNTSPHQIPQ |
| | | | EEFTVTGLEENAQYQFRAIAKTAVNI |
| | | | SQPSEPSDPVTIMAESVPPRIELSVAM |
| | | | KSLLTVKAGTNVCLDATVFGKPKPT |
| | | | VSWKKDGTLLKPSEGIKMAMKRNL |
| | | | CTLELFSVTRKDSGDYTITAENPSGS |
| | | | KSATIKLKVLDKPGPPASVKINKMYS |
| | | | DRAMLSWEPPLEDGGSEITNYIVDKR |
| | | | ETSRPNWAQVSATVPITSCSVEKLIE |
| | | | GHEYQFRICAENKYGVGDPILTEPAI |
| | | | AKNPYDPPGRCDPPVISNVTKDHMT |
| | | | VSWKPPADDGGSPITGYLVEKRETH |
| | | | AVNWTKVNRKPVIERTIKATGLQEG |
| | | | TEYEFRVIAINKAGPGKPSDASKAVY |
| | | | AQDPLYPPGPPAFPKVYDTTRSSVSL |
| | | | TWGKPAYDGGSPIIGYLVEVKRADS |
| | | | DNWVRCNLPQKLQKTRFEVTGLME |
| | | | NTEYQFRVYAVNKIGYSDPSDVPDK |
| | | | HCPKDILIPPEGELDADLRKTLILRAG |
| | | | VTMRLYVPVKGRPPPKITWSKPNVN |
| | | | LRERVGLDIKSTDFDTFLRCEKVNKY |
| | | | DAGKYILTLENSCGKKEYTIVVKVL |
| | | | DTPGPPVNVTVKEISKDSAYITWDPPI |
| | | | IDGGSPIINYVVEKRDAERKSWSTVT |
| | | | TECSKTSFRVSNLEEGKSYFFRVFAE |
| | | | NEYGIGDPGETRDAVKASETPGPVV |
| | | | DLKVTSVTKSSCSIGWKKPRSDGGSR |
| | | | IIGYVVDFLTEENKWQRVMKSLSLQ |
| | | | YTTKDLTEGKEYTFRVSAENENGEG |
| | | | TPSEITAVAKDDVVAPDLDLKDLPDL |
| | | | CYLAKENSNFRLKIPIKGKPVPSVSW |
| | | | KKGEDPLATDTRVSVESSAVNTTLV |
| | | | VYDCRKSDAGKYTITLKNVAGTKEG |
| | | | TLTIKVVGKPGIPTGPIKFEEVTAEAV |
| | | | TLKWGPPKDDGGSEITNYILEKRDSV |
| | | | NNKWVTCASAVQKTTFRVMRLHEG |
| | | | MEYTFRVSAENKYGVGEGLKSEPIV |
| | | | ARHPFDVPDAPPPPNIVDVRHDSVSL |
| | | | TWTDPRKTGGSPITGYHIEFKERNSL |
| | | | LWKRANKTPIRMKDFKVTGLTEGLE |
| | | | YEFRVMAINLAGVGKPSLPSEPVVAL |
| | | | DPIDPPGKPEVISVTRNSVTLVWTEP |
| | | | KYDGGHKLTGYIVEKRELPSKSWTK |
| | | | ANHVNVPDCAFTVTDLVEGGKYEFR |
| | | | VRAKNTAGAISAPSESTDTIICKDEYE |
| | | | APTIVLDPTIKDGLTVKAGDTIILSAIS |
| | | | ILGKPLPKSSWSKAGKDIRPSDIVQIT |
| | | | STPTSSMIAVKYATRKDAGEYTITAT |
| | | | NPFGTKSEHVKVTVLDVPGPPGPIEIS |
| | | | NVSAEKATLTWTPPLEDGGSPIKSYV |
| | | | LEKRETSRLLWTVVAEDIQSCRHVA |
| | | | TKLIQGNEYVFRVSAVNQYGKGEPV |
| | | | QSEPVKMVDRFGPPGPPGKPEVSNV |
| | | | TKNTATVSWKRPVDDGGSEITGYHV |
| | | | ERREKKSLRWVRATKTPVSDLRCKV |
| | | | TGLQEGNTYEFRVSAENKAGIGPPSD |
| | | | ASNPVLMKDVAYPPGPPSNARVTDT |
| | | | TKKSASLAWGKPHYDGGLEITGYVV |
| | | | EHQKVGDEGWIKDTTGTALRITEFV |
| | | | VPDLETKEKYNFRISAINDAGVGEPA |
| | | | VIPNVEIVEREMAPDFELDAELRRTL |
| | | | VVRAGLSIRIFVPIKGRPAPEVTWTK |
| | | | DNINLKNRANIENTESFTLLIIPECNR |
| | | | YDTGKFVMTIENPAGKKSGFVNVRV |
| | | | LDTPGPVLNLRPTDITKESVTLHWDL |
| | | | PLIDGGSRITNYIVEKREATRKSYSTV |
| | | | TTKCHKCTYKVTGLSEGCEYFFRVM |
| | | | AENEYGIGEPAETTEPVRASEAPSPP |
| | | | DSLNIMDITKSTVSLAWPKPKHDGGS |
| | | | KITGYVIEAQRKGSDQWTHITTVKGL |
| | | | ECVVKNLTEGEEYTFQVMAVNSAG |
| | | | RSAPRESRPVIVKEQTMLPELDLRGI |
| | | | YQKLVIAKAGDNIKVEIPVLGRPKPT |
| | | | VTWKKGDQILKQTQRVNFENTATST |
| | | | ILNINECVRSDSGPYPLTARNIVGEVG |
| | | | DVITIQVHDIPGPPTGPIKFDEVSSDF |
| | | | VTFSWEPPENDGGVPISNYVVEMRQ |
| | | | TDSTTWVELATTVIRTTYKATRLTTG |
| | | | VEYQFRVKAQNRYGVGPSITSAPVV |
| | | | ANYPFKVPGPPGTPQVAAVTKDSITI |
| | | | SWHEPLSDGGSPILGYHVERKERNGI |
| | | | LWQTVSKALVPGNIFKSSGLTDGIAY |
| | | | EFRVIAENMAGKGKPSKPSEPILALD |
| | | | PIDPPGKPVPLNITRHTVTLKWAKPE |
| | | | YTGGFKITSYIVEKRDLPNGRWLKA |
| | | | NFSNILENEFTVSGLTEDAAYEFRVIA |
| | | | KNAAGAISPPSEPSDAITCRDDIEAPR |
| | | | IMVDVKFKDTITLKAGEAFKLEADV |
| | | | SGRPPPTMEWTKDGKELENTAKLEI |
| | | | KIADFSTNLVNKDSLRRDGGAYTLT |
| | | | ATNPGGFAKHIFHVKVLDRPGPPEGP |
| | | | LAVSEVTSEKCVLSWLPPLDDGGAKI |
| | | | EYYVVQKRETSRLAWTNVASEVQV |
| | | | TKLKVTKLLKSNEYIFRVMAVNKYG |
| | | | VGEPLDSEPVLAVDPYGPPDPPKNPE |
| | | | VTSITKDSMVVCWGHPDSDGGSEIIN |
| | | | YIVERRDKAGQRWVKCNKKTLTDL |
| | | | RYKVSGLTEGHEYEFRVMAENRAGI |
| | | | SAPSATSPFYKACDAVFKPGPPGNPR |
| | | | VLDTSRSSISIAWNKPIYDGGSEITGY |
| | | | MVEIALPEEDEWKIVTPPSGLKATSY |
| | | | TITNLTENQEYKIRIYAMNSEGIGEPA |
| | | | LVPGTPKAEDRMLPPEIELDAELRKV |
| | | | VTIRACCTLRLFVPIKGRPAPEVKWT |
| | | | REHGESLDKASIESTSSYTLLIIGNVN |
| | | | RFDSGKYILTIENSSGSKSAFVNVRV |
| | | | LDTPGPPQDLKVKEVTKTSVTLTWE |
| | | | PPLIDGGSKINNYIVEKRESTRKAYST |
| | | | VTTNCHKTSWKVDQLQEGCSYYFR |
| | | | VLAENEYGIGLPAETAESVKASERPL |
| | | | PPGKITLVDVTRNSVSLSWEKPEHDG |
| | | | GSRILGYIVEMQSKGSDKWVTCATV |
| | | | KVTEATITGLIQGEEYSFRVSAQNEK |
| | | | GISDPRQLSVPVIAKDLVIPPAFKLLF |
| | | | TTFTVLAGEDLKVDVPFTGRPTPAVT |
| | | | WHKDDVPLKQTTRVNAESTENNSLL |
| | | | TIKEACREDVGHYIVKLTNSAGEATE |
| | | | TLNVIVLDKPGPPTGPVKMEEVTADS |
| | | | VTFSWGPPKYDGGSSINNYIVEKRDT |
| | | | STTTWQIVSATVARTTIKACRLKTGC |
| | | | EYQFRIAAENRYGKSTYLTSEPVVAQ |
| | | | YPFKVPGPPGTPFVTLSSKDSMEVH |
| | | | WNEPVSDGGSKVIGYHLERKERNSIL |
| | | | WVKLNKTPIPQTKFKTTGLDEGIEYE |
| | | | FRVSAENIVGIGKPSKVSESYVARDP |
| | | | CDPPGRPEPIIVTRNSVTLQWKKPAY |
| | | | DGGSKITGYIVEKKELPDGRWMKAS |
| | | | FTNVIDTQFEVTGLVEDHRYEFRVIA |
| | | | RNAAGVFSEPSESTGAITARDEVEPP |
| | | | QIRMDPKYKDTIVVHAGELFKIDADI |
| | | | HGKPIPTTQWIKGDHELSNTARLEIK |
| | | | STDFATSLSVKDAIRIDSGSYILKAKN |
| | | | VAGEKSVTVNVKVLDRPGPPEGPIVI |
| | | | SGVTAEKCTLAWKPPLQDGGSDIINY |
| | | | IVERRETSRLVWTVVDANVQTLGCK |
| | | | VTKLLEGNEYIFRVMAVNKYGVGEP |
| | | | LESEPVTAKNPFVVPDAPKAPEITAV |
| | | | TKDSMIVVWERPAFDGGSEILGYVL |
| | | | EKRDKEGIRWTRCHKRLIGELRLRVT |
| | | | GLLENHNYEFRVSAENAAGLSEPSPP |
| | | | SAYQKACDPIYKPGPPNNPRVTDITR |
| | | | SSVFLSWGKPIYDGGCEIQGYIVEKC |
| | | | DTSVGEWTMCTPPTGINKTNIEVEKL |
| | | | LEKHEYNFRICAVNKAGVGEHADVP |
| | | | GPVIVEEKLEAPDIDLDLELRKILNIR |
| | | | AGGSLRLFVPIRGRPTPEVKWGKVD |
| | | | GEIRDAAIIDSTSSFTSLVLDNVNRYD |
| | | | SGKYTLTLENSSGTKSAFVTVRVLDT |
| | | | PSPPVNLKVTEITKDSVSITWEPPLLD |
| | | | GGSKIKNYIVEKREATRKSYAAVVT |
| | | | NCHKNSWKIDQLQEGCSYYFRVTAE |
| | | | NEYGIGLPAHTDDPVKVAEVPQPPG |
| | | | KITVDDVTRNSVSLSWTKPEHDGGS |
| | | | KIIQYIVEMQAKHSEKWSECARVKSL |
| | | | EAVITNLTQGEEYLFRVVAVNEKGR |
| | | | SDPRSLAVPIVAKDLVIEPDVRPAFNS |
| | | | YSVQVGQDLKIEVPISGRPKPTITWT |
| | | | KDDLPLKQTTRINVTDSLDLTVLSIK |
| | | | ETHKDDGGHYGITVANVVGQKTASI |
| | | | EIITLDKPDPPKGPVKFDEVSAESITLS |
| | | | WEPPLYTGGCQITNYVVQKRDTTTT |
| | | | VWEWSATVARTTLKVTKLKTGTEY |
| | | | QFRIFAENRYGQSFALESEPIVAQYP |
| | | | YKEPGPPGTPFVTAVSKDSMVVQWH |
| | | | EPINNGGSPVIGYHLEKKERNSILWT |
| | | | KVNKTIIHDTQFKAVNLEEGIEYEFR |
| | | | VYAENIVGIGKASKNSECYVARDPC |
| | | | DPPGTPEAIIVKRHEITLQWTKPAYD |
| | | | GGSVITGYIVEKRDLPEGRWMKASF |
| | | | TNVIETQFTVSGLTEDQRYEFRVIAK |
| | | | NAAGAVSKPSDSTGPITARDEVELPR |
| | | | ISMDPKFRDTIVVNAGETFRLEADVH |
| | | | GKPLPTIEWLRGDKEIEESARYEIKNT |
| | | | DFKALLIVKDAIRIDGGQYILRASNV |
| | | | AGSKSFPVNVKVLDRPGPPEGPVQV |
| | | | TGVTAEKCTLTWSPPLQDGGSDISHY |
| | | | VVEKRETSRLAWTVVASEVVTNSLK |
| | | | VTKLLEGNEYIFRIMAVNKYGAGEP |
| | | | LESAPVLMKNPFVLPGPPKSLEVTNI |
| | | | AKDSMTVCWNRPDSDGGSEIIGYIVE |
| | | | KRDRSGIRWIKCNKRRITDLRLRVTG |
| | | | LTEDHEYEFRVSAENAAGVGEPSPA |
| | | | TLYYKACDPVFKPGPPINAHVVDTT |
| | | | KNSITLAWGKPIYDGGSEILGYVVEI |
| | | | CKADEEEWQIVTPQTGLKATRFEISK |
| | | | LTEHQEYKVRVCALNKVGLGEATA |
| | | | VPGTVKPEDKLEAPELDLDSELRKGI |
| | | | VVRAGGSVRIHIPFKGRPTPEITWSRE |
| | | | EGEFTDKVQIEKAANYTQLSIDNCDR |
| | | | NDAGKYVLKLENSSGSKSAFVTVKV |
| | | | LDTPGPPQNLAVKEVRKDSVLLVWD |
| | | | PPLIDGGAKVKNYVIDKRESTRKAY |
| | | | ANVSNKCSKTSLKVENLTEGAIYYFR |
| | | | VMAENEFGIGVPVETVDAVKASEPP |
| | | | SPPGKVTLTDVSQTSASLMWEKPEH |
| | | | DGGSRILGYVVEMQPKGTEKWSVV |
| | | | AESKVCSAWTGLSSGQEYHFRVKA |
| | | | YNEKGQSDPRVLGVPVIAKDLTIQPS |
| | | | FKLPFNTYSVQAGEDLKIEIPVIGRPR |
| | | | PEISWVKDGEPLKQTTRVNVEKTAT |
| | | | STILHIKESNKDDFGKYTVTATNSAG |
| | | | TATENLSIIILEKPGPPVGPVRFDEVS |
| | | | ADFVVISWEPPAYTGGCQISNYIVEK |
| | | | RDTTTTTWHMVSATVARTTIKITKL |
| | | | KMGSEYQFRIFAENRYGKSAPLDSKP |
| | | | VIVQYPFKEPGPPGTPFVTSVSKDQM |
| | | | LVQWHEPVNDGGSKVIGYHLEQKE |
| | | | KNSILWVKLNKTPIQDTKFKTTGLDE |
| | | | GLEYEFRVSAENIVGIGKASKVSECF |
| | | | VARDPCDPPGRPEAIVITRNNVTLKW |
| | | | KKPAYDGGSKITGYIVEKKDLPDGR |
| | | | WMKASFTNVLDTEFTVSGLVEDQRY |
| | | | EFRVIARNAAGNFSEPSESTGAITAR |
| | | | DEIDAPNASLDPKYKDVIVVHAGETF |
| | | | VLEADIRGKPIPDIVWSKDGRELEET |
| | | | AARMEIKSTIQRTTLVVKDCIRSDGG |
| | | | QYILKLSNVGGTKTIPITVKVLDRPGP |
| | | | PEGPLKVSGVTAEKCYLAWNPPLQD |
| | | | GGASISHYIIEKRETSRLSWTQVSTEV |
| | | | QALNYKVTKLLPGNEYIFRVMAVNK |
| | | | YGTGDPLESEPVIARNPYKPPGPPSPP |
| | | | EVSAITKDSMVVTWARPVDDGGAEI |
| | | | EGYILEKRDKEGVRWTKCNKKTLTD |
| | | | LRFRVTGLTEGHSYEFRVAAENAAG |
| | | | VGEPSEPSVFSRACDALYPPGPPSNP |
| | | | KVTDTSRSSVSLAWNKPIYDGGAPV |
| | | | KGYVVEVKEATADEWTTCTPPTGLQ |
| | | | GKQFTVTELKENTEYNFRICAINSEG |
| | | | VGEPATIPGSVAAKERQEPPEIELDA |
| | | | DLRKVVILRASATLRLFVTIKGRPEPE |
| | | | VKWEKAEGVLTDRAQIEVTSSYTML |
| | | | VIDNVTRFDSGRYNLTLENNSGSKTA |
| | | | FVNVRVLDSPSAPVNLTVREVKKDS |
| | | | VILAWEPPLIDGGAKITNYIVEKRETT |
| | | | RKAYATVTNNCTKNSFKIENLQEGC |
| | | | SYYFRVLASNEYGIGLPAETTEPVKA |
| | | | SEPPLPPGRVTLVDVTRNTATIKWEK |
| | | | PESDGGSKITGYVVEMQTKGSEKWS |
| | | | ICTQVKTLEATISGLTAGEEYIFRVAA |
| | | | INEKGKSDPRQLGVPVIARDIEIKPSV |
| | | | ELPFNTFNVKARDQLKIDIPFKGRPQ |
| | | | ATVSWKKDGQTLKETTRVNVSSSKT |
| | | | VTSLIIKEASREDVGTYELCVSNSAG |
| | | | SVTVPITVIVLDKPGPPGPIHIDEVSC |
| | | | DNITISWNPPEYDGGCQISNYIVEKRE |
| | | | TTSTTWHVVSQAVARTSIKIVRLVTG |
| | | | SEYQFRVCAENRFGKSSYSESSAVVA |
| | | | EYPFSPPGPPGTPKVVHATKSTMLVT |
| | | | WQVPVNDGGSRVLGYHLEYKERSSI |
| | | | LWSKANKTLIADTQMKVSGLDEGL |
| | | | MYEYHVYAENIAGIGKCSKSCEPVP |
| | | | ARDPCDPPGQPEVTNITRKSVSLKWS |
| | | | KPHYDGGAKITGYIIERRELPDGRWL |
| | | | KCNFTNVPETYFEVTELTEDQRYEFR |
| | | | VFARNAADSISEPSESTGPITVKDDVE |
| | | | APRIMMDVKFRDVIVVKAGEVLKIN |
| | | | ADVAGRPLPIISWAKDGVEIEERART |
| | | | EIVSTDYTTLLTVKDCVRRDSGQYV |
| | | | LTVKNVAGTRSMAVNCKVLDKPGP |
| | | | PAGPLEITGLTAEKCSLSWGPPQEDG |
| | | | GAAIDYYIVEKRETSRLAWTICEGEL |
| | | | RTTFCKVTKLLKGNEYIFRVTGVNK |
| | | | YGVGEPLESMAVKALDPFTVPSPPTS |
| | | | LEITSVTKEFMTLCWSRPESDGGSEIS |
| | | | GYIVERREKNSLRWVRVNKKPVYDL |
| | | | RVKSTGLREGCEYEYRVYAENAAGL |
| | | | SLPSESSPLIRAEDPVFLPSPPSKPNV |
| | | | MDSGKTNITIGWVKPLFDGGAPITGY |
| | | | TVEFKKSDETDWQTAIQNLRGTEYT |
| | | | VSGLTTGAEYVFRVRSINKVGASDPS |
| | | | DSSDPQIAKEREEEPVFDLDTEMRKT |
| | | | LIVKAGASFTMTVPFRGRPVPSVSWS |
| | | | KPDTDLRTRAYIDSTESRTSLTIENAN |
| | | | RNDSGKYTLMIQNVLNAASLTLVVK |
| | | | VLDSPGPPANITVHDVTKESAVLSW |
| | | | DVPENDGGAPVKNYHIEKREASKKA |
| | | | WVSVTNNCNRLSYKITNLQEGAIYY |
| | | | FRVSGENEFGVGVPAETKEGVKITEK |
| | | | PSPPEKLGVTSVSRDSVSLAWLKPEH |
| | | | DGGSRIVHYVIEALEKGQTTWMRCA |
| | | | VVKSTHHVVSGLRQNSEYFFRVFAE |
| | | | NQAGLSDPRELLLPVLIKEQLEPPEID |
| | | | MKNFPSHTVYVRAGSNLKVDIPISGK |
| | | | PLPKVTLSRDGVPLKATMRFNTEITA |
| | | | ENLTINLKESVAADAGRYEITAANSS |
| | | | GTTKAFINIVVLDRPGPPTGPVVISDI |
| | | | TEDSVTLKWEPPKYDGGSQVTNYIV |
| | | | LKRETSTAVWTEVSATVARTMIKVM |
| | | | KLTTGEEYQFRIKAENRFGISDHIDSA |
| | | | CVVVKLPYTTPGPPSTPWVTNVTRES |
| | | | ITVGWHEPVSNGGSPVTGYHLEMKD |
| | | | RNSILWQKANKMVIRTTHFKVTTISA |
| | | | GLIYEFRVYAENAAGIGKPSHPSEPV |
| | | | LAIDACEPPRNVRITDISKNSVNLSW |
| | | | QQPAFDGGSKITGYMVERRDLPDGR |
| | | | WAKASFTNVTETHFTVSGLTQNAQY |
| | | | EFRVFARNAVGSISNPSEVVGPITCID |
| | | | SYGGPVIDLPLEYTEVVKYRAGTSV |
| | | | KLRAGISGKPEPTIEWYKDDKELQTN |
| | | | ALVCVENTTDLASILIKDATRLNSGT |
| | | | YELKLRNALGSASATIRLQILDKPGP |
| | | | PGGPIEFKTVTAEKITLLWQPPADDG |
| | | | GAKITHYIVEKRETSRVVWSMVSEN |
| | | | LEECIIKTTKIIKGNEYIFRVRAVNKY |
| | | | GIGDALESHPVIARNAFVTPGPPSVPE |
| | | | VTKINKNSMTVVWSRPVADGGSDIS |
| | | | GYILEKRDKKSLGWFKVLKETIRDTR |
| | | | QKVTGLTEHSDYQYRVCAVNAAGQ |
| | | | GPFSEPSDFYKAADPIDPPGPPAKIRI |
| | | | ADSTKSSITLGWSKPVYDGGSAVTG |
| | | | YVVAMRQGEEEEWTVVSTKGEVRT |
| | | | TEYVVSNLSPGVNYYFQVSAVNCAG |
| | | | QGEPIAMTEPVQAKDILEEPEIDLDV |
| | | | AFRTSIIAKAGEDVHALVPFKGRPPP |
| | | | TVTWRKDEKNLGSDARYSIQNTDSS |
| | | | SILTIPQVTRHDTGKYILTIENGVGQP |
| | | | KSSTVSVKVLDTPAACQNLQVKHVS |
| | | | QGTVTLFWDPPLIDGGSPIINYIIEKK |
| | | | DATKRTWSSVSHKCSSTSFKVTDLSE |
| | | | KTPFFFRVFAVNEIGIGEPCETTEPVK |
| | | | AAEVPAPIRDLSVKDSTKTSVTLSWT |
| | | | KPDFDGGSVITDYIVERKGKGEQTW |
| | | | SHAGISKTCEIEVGKLKELSELEFRVS |
| | | | ARNEKGLSDSVSIGPVTVKELVIPPE |
| | | | VDLSEIPGAQVAVRIGHNVHLELPYK |
| | | | GKPKPSISWLKDGLPLKESELVRLGK |
| | | | TENKLTLSIKNAKKENGGKYTIILDN |
| | | | AVCRNTYPITVITLGPPSKPKGPIRFD |
| | | | EIKADSVIMSWDVPDDDGGGEITCYS |
| | | | IEKREASQTNWKMVCSSVARTTFKV |
| | | | PNLVKDAEYQFRVRAENRYGVSQPL |
| | | | VSNIILAKHQFRIPGPPGKPVTYNVTS |
| | | | DGMSLTWDAPVYDGGSEVTGYHVE |
| | | | KKERNSILWQRINMSPISGREYRATG |
| | | | LMEGLDYQFRVFAENSAGLSSPSDPS |
| | | | KFTLAVSPVDPPGTPDYIDVTRETITL |
| | | | KWNPPLRDGGSKIVAYSIEKRQGSD |
| | | | RWTRCNFTDVSECQYTVTGLSPGDR |
| | | | YEFRIIARNAVGTISPPSQSSGVIMTR |
| | | | DENVAPTVEFGPEYFDGITIKSGESLR |
| | | | IKALVQGRPVPRVTWFKDGVEIEKK |
| | | | MNMEITDVLGSTSLFVRDATRDHRG |
| | | | VYRVEAKNASGSTKAEITVRVQDTP |
| | | | GKPVGPIRFTNITGEKMTLWWDAPH |
| | | | NDGCAPVSHYLIEKRETSRLAWALIE |
| | | | DNCEALSYTATKLITGNEYQFRISAV |
| | | | NKFGVSRPLDSDPVVAQIQYTIPDAP |
| | | | GTPEPSNVTGNSITLTWARPESDGGS |
| | | | EIQQYILERREKKSTRWVKVISKRPIC |
| | | | ETRFKVTGLTEGNEYEFHVMAENAA |
| | | | GVGPASGVSRLIKCREPVNPPGAPTV |
| | | | VKVTDTSKTTVSLEWSKPVFDGGLEI |
| | | | IGYIIEMCKADLGDWHKVNVEACVK |
| | | | TRYTVTDLQAGEEYKFRVSAINAAG |
| | | | KGDSCEVTGTIKAVDRLSAPELDIDA |
| | | | NFKQTHVVRAGASIRLFIAYQGRPTP |
| | | | TAVWSKPDSNLSIRADIHTTDSFSTLT |
| | | | VENCNRTDAGKYTLTVENNSGSKSI |
| | | | TFTVKVLDSPGPPGPITFKDVTRGSA |
| | | | TLMWDAPLLDGGARIHHYVVEKRE |
| | | | ASRRSWQVVSEKCIRQILRVSDLLEG |
| | | | VPYYFRVSAENEYGVGEPYEMPEPM |
| | | | VATEQPAPPRRLDIVDTSKSSVVLAW |
| | | | LKPDHDGGSRITGYLLEMRQKGSDF |
| | | | WVEAGHTKQMTFTVERLVENTEYEF |
| | | | RVKAKNDAGYSEPREAFSSVIIKEPQI |
| | | | EPTADLTGITNQLITCKAGSTFTIDVPI |
| | | | SGRPAPKVTWKLEEMRLKETDRVSI |
| | | | TTTKDRTTLSVKDSMRGDSGRYFLT |
| | | | LENTAGVKTFTITVVVIGRPGPVTGPI |
| | | | EVSSISAESCVLSWAEPQDNGGTDIT |
| | | | NYIVEKRESGTTAWQLVNSSVKRTQI |
| | | | KVTHLTKYMEYSFRVSSENRFGVSK |
| | | | PVESAPIVAEHPFVPPSAPTRPEVYYV |
| | | | SANAMSIRWEEPYHDGGSKVIGYWV |
| | | | EKKERNTILWVKENKVPCLECNYKV |
| | | | TGLVEGLEYQFRTYALNAAGVSKAS |
| | | | EASRPVMAQNPVDAPGRPEVTDVTR |
| | | | STVSLIWSAPVYDGGSKVVGYIIERK |
| | | | PVSEVGDGRWLKCNYTIVSDNFFTV |
| | | | TALSEGDTYEFRVLAKNAAGVISKG |
| | | | SESTGPITCRDEYAPPKAELDARLQG |
| | | | DLVTIRAGSDLVLDAAVGGKPEPKII |
| | | | WTKGDKELDMCEKISLQYTGKRAT |
| | | | AVIKFCDRSDSGKYTLTVKNASGTK |
| | | | AVSVLVKVLDSPGPCGKLTVSRVTE |
| | | | EKCTLAWSLPQEDGGAEITHYIVERR |
| | | | ETSRLNWVIVEGECPTLSHVVTRLIK |
| | | | NNEYIFRVRAVNKYGPGVPVESEPIV |
| | | | ARNSFTIPSQPGIPEEVGAGKEHIIIQ |
| | | | WTKPESDGGNDISNYLVDKREKKSL |
| | | | RWTRVNKDHVVYDTRLKVTGLMEG |
| | | | CDYQFRVTAVNAAGNSEPSEASNFIS |
| | | | CREPSYTPGPPSAPRVVDTTKHSISLA |
| | | | WTKPMYDGGTDIIGYVLEMQEKDT |
| | | | DQWYRVHTNATIRNNEFTVTDLKM |
| | | | GQKYSFRVAAVNVKGMSEYSESTAE |
| | | | IEPVERLEIPDLELADDLKKTVTIRAG |
| | | | ASLRLMVSVSGRPPPVITWSKKGIDL |
| | | | ASRAIIDTTESYSLLIVDKVNRYDAG |
| | | | KYTIEAENQSGKKSATVLVKVYDTP |
| | | | GPCPSVKVKEVSRDSVTITWEVPTID |
| | | | GGAPVNNYIIEKREAAMRAFKTVTT |
| | | | KCSKTLYRISGLIEGAMYYFRVLPEN |
| | | | IYGIGEPCETSDAVLVSEVPLVPTKLE |
| | | | VVDVTKSTVTLAWEKPLYDGGSRLT |
| | | | GYVLEACRAGTERWMKVVTLKPTV |
| | | | LEHTVISLNEGEQYLFRVRAQNEKG |
| | | | VSEPREIVTAVTVQDLRVLPTIDLST |
| | | | MPQKTIHVPAGRPVELVIPIAGRPPPA |
| | | | ASWFFAGSKLRESERVTVETHTKVA |
| | | | KLTIRETTIKDTGDYVLELKNVTGTT |
| | | | SETIKVIVLVDKPGPPSGPIKVDEIDA |
| | | | TSVTISWGPPELDGGAPLSGYVVEQR |
| | | | DAHRPGWLPVSESVTRSTFKFTRLIE |
| | | | GNEYVFRVAATNRFGIGSYLQSEVIE |
| | | | CRSSINIPGPPETLQIFDVSREGMTLT |
| | | | WYPPEDDGGSQVTGYIVERKEVRAD |
| | | | RWVRVNKVPVTMTRYRSTGLIEGLE |
| | | | YEHRVTAVNVRGTGKPSRPSKPTVA |
| | | | MDPIAPPGKPQNPRVTDTTRTSVSLA |
| | | | WSVPEDEGGSKVTGYLIEMQKVDQ |
| | | | HEWTKCNTTPTKIREYTLTHLPQGAE |
| | | | YRFRVLACNAGGPGEPAEVPGTVKV |
| | | | TEMLEYPDYELDERYQEGILVRQGG |
| | | | VIRLTIPIKGKPFPICKWTKEGQDISK |
| | | | RAMIATSETHTELVIKEADRDDSGTY |
| | | | DLILENKCGKKAVYIKVRVIGNPNTP |
| | | | EGPLEYDDIQARSVRVSWRPPADDG |
| | | | GADILGYILERREVPKSAWYTIDSRV |
| | | | RGTSLVVKGLKENVEYHFRVSAENQ |
| | | | FGISKPLKSEEPVIPKTPLNPPEPPSNP |
| | | | PEILDVTKSSVSLSWSRPKDDGGSRV |
| | | | TGYYIERKETSTDKWVRHNKTQITTT |
| | | | MYTVTGLVPDAEYQFRIIAQNDVGL |
| | | | SETSPASEPVVCKDPFDKPSQPGELEI |
| | | | LSISKDSVTLQWEKPECDGGKEILGY |
| | | | WVEYRQSGDSAWKKSSKDRIKDRQ |
| | | | FTIGGLLEATEYEFRVFAENETGLSRP |
| | | | RRTAMSVKTKLTSGEAPGVRKEMK |
| | | | DVTTKLGEAAQLSCQIVGRPLPDIKW |
| | | | FRFGKELVQSRKYKMSSDGRTHTLT |
| | | | VMTEEQEDEGVYTCVATNEVGEVES |
| | | | SSKLLLQATPQFHPGYPLKEKYYGA |
| | | | VGSTLRIHVMYIGRPVPAITWFRGQK |
| | | | LLQNSENITIENTEHYTHLVMKNVQR |
| | | | KTHAGKYKVQLSNVLGTVDTMLDV |
| | | | EIQDKPDKPTGPIVIEALLKNSVVISW |
| | | | KPPADDGGSWITNYVVEKCEAKEGA |
| | | | EWQLVSSAISVTTCRIVNLTENAGYY |
| | | | FRVSAQNMFGISEPLEVSSVVIIKSPF |
| | | | EKPGAPGKPTITAVTKDSCVVAWKP |
| | | | PASDGGAKIRNYYLEKREKKQNKWI |
| | | | AVTTDEIRETVFSVQNLIEGLEYEFR |
| | | | VKCENLGGESEWSEISEPVTPKSDVPI |
| | | | QAPHFKEELRNLNVRYQSNATLVCK |
| | | | VTGHPKPIVKWYRQGKEIIADGLKY |
| | | | RIQEFKGGYHQLIIASVTDDDATVYQ |
| | | | VRATNQGGSVSGTASLEVEDTVPAK |
| | | | IHLPKNLEGMGAVHALRGEVISIKIPF |
| | | | SGKPDPVITWQKGQDLIDNNGHYQV |
| | | | IVTRSFTSLVFPNGVERKDAGFYVVC |
| | | | AKNRFGIDQKTVELDVADVPDPPRG |
| | | | VKVSDVSRDSVNLTWTEPASDGGSK |
| | | | VTNYIVEKCATTAERWIRVGQARET |
| | | | RYTVINLFGKTSYQFRIIAENKFGLSK |
| | | | PSEPSEPTVTKEDKTRAMNYDEEVD |
| | | | ETREVSMTKASHSSTKELYEKYMIA |
| | | | EDLGRGQFGIVHRCVETSSKKTYMA |
| | | | KFVKVKGTDQVLVKKEISILNIARHR |
| | | | NMLYLHESFESMEELVMIFEFISGLDI |
| | | | FERINTSAFELNEREIVSYVRQVCEAL |
| | | | EFLHSHNIGHFDIRPDNIIYQTRRSSTI |
| | | | KIIEFGQARQLKPGDNFRLQFTAPEY |
| | | | YAPEVHQHDVVSTATDMWSLGTLV |
| | | | YVLLSGINPFLAETNQQIIENIMNAEY |
| | | | TFDEEAFQEISLEAMDFVDRLLVKER |
| | | | KSRMTASEALQHPWLKQKTERVSTK |
| | | | VIRTLKHRRYYHTLVKKDLNMVVSA |
| | | | ARISCGGAIRSQKGVSIAKVKVASIEI |
| | | | GPVSGQIMHAVGEEGGYVKYVCRIE |
| | | | NYDQSTQVTWYFGVRQLENSEKYEI |
| | | | TYEDGVATMYVKDITKFDDGTYRC |
| | | | KVVNDYGEDSSYAELFVKGVREVY |
| | | | DYYCRRTVKKLKRRTDAMRLLERPP |
| | | | EFTLPLYNKTAYVGENVRFGVTITVH |
| | | | PEPRVTWYKSGQKIKPGDDDRKYIFE |
| | | | SDKGLYQLTINSVTMDDDAEYTVVA |
| | | | RNKYGEDSCKAKLTVTPHPPPSDTTL |
| | | | RPMFKRLLANAECQEGQSVCFEIRVS |
| | | | GIPPPTLKWEKDGRPLSLGPNIEIIHE |
| | | | GLDYYALHIRDTLPEDTGYYRVTAT |
| | | | NTAGSSSCQAHLQVERLRYVKQEFK |
| | | | TKEEHERHVQRQIDKTLRMAEILSGT |
| | | | EAVPLTQVAQEALREAAILYKPAVST |
| | | | KTVKGEYRLETEEKKEERKLRMPYE |
| | | | VPEPRKYKQTTIEEDQHIKQFVPMSD |
| | | | MKWYKKIRDQFEMPGKIDRVVQKR |
| | | | PKRIRLSRWEQFYVMPLPRITDQYRP |
| | | | KWRIPKLSQDDLEMVRPARRRTPSP |
| | | | DYYYYYRPRRRSLGDISDEELLLPID |
| | | | DYLAMKRTEEERLRLEEELELGFSAS |
| | | | PPSRSPPRFELSSLRYSSPQAHVKVEE |
| | | | ARRDFRYSTYHIPTKEETSTSYAELR |
| | | | ERHARASHRQAHQRQRIMAEREDHE |
| | | | LLRPATTTQRLLEYKSELDHLAKEA |
| | | | KSRKKSRRQREVTEITEIEEEYEISKH |
| | | | AQRETSSSVSRLLRRRRSLSPTYIELM |
| | | | RPVSELIRPRPRPAEEYEDEEEEEEED |
| | | | VERRSPTPERTRPRSPSPVSSERSLSR |
| | | | FERSARFDIFSRYESMKAALKTQKTS |
| | | | ERKYEVLSQQPFTLDHAPRITLRMRS |
| | | | HRVPCGQNTRFILNVQSKPTAEVKW |
| | | | YHNGVELQESSKIHYTNTSGVLTLEI |
| | | | LDCHIDDSGTYRAVCTNYKGEASDY |
| | | | ATLDVTGGDYTTYASQRRDEQVPRS |
| | | | VFPELTRTEAYAVSSFKKTSEMEASS |
| | | | SVREMKSLMTETRESLSSYEHHASA |
| | | | EMKSAAIEEKSLEEKSTHRKIKTTLA |
| | | | ARILTKPRSITVYEGESARFSCDTDGE |
| | | | PVPTVTWLRGGQVISTSARHQVTTS |
| | | | KYKSTFEISSVQASDEGNYSVVVENS |
| | | | DGRQEAQFTLTVQKARVTEKAVTSP |
| | | | PRVKSPEPRVKSPEGAKSPKRVKSPE |
| | | | PVTPHPKAVPPTETKPTPTEKVQQKP |
| | | | VAAPPKIIQSLKAEASKDIAKLTCVV |
| | | | ESSALCAKEVTWYKDGRRLKENGHF |
| | | | QFHYSADGTYELKILNLAESDRGEY |
| | | | VCEVSGEGGTSKTNFQFVGQAFKSIH |
| | | | EQVSSISETNKKAAPKTAEPTETKKT |
| | | | EPKAPAPISTKPVIVTGLQDTTVSSDS |
| | | | VAKFAVKVTGEPQPTVIWTKDGKAI |
| | | | SQGGKYKLSEDKGAFFLEIHKTDTSD |
| | | | SGLYTCTITNSAGSVSSSCKLTIKVVE |
| | | | DTEIQKVSAQKTSEITSQKKASVQEEI |
| | | | SKKALISEEIKTSEVKSHEKLALKEEA |
| | | | STVLISEKVKKSEAASLEKSVVHEEIT |
| | | | KTSQASEEIRTHAEIKAFSTQMSITAG |
| | | | QKVTLKANIAGATDVKWVLNGVEL |
| | | | SNSDEYRYGISGSDQTLTIRQAGHKD |
| | | | EGILTCIGKTSQGIIKCQYDLTLSKEL |
| | | | SDAPAFISQPRSQNVNEGQNVLFSCEI |
| | | | SGEPSPEIEWFKNNLPISISSNISVSRS |
| | | | RNVYSLEIRNASVSDSGKYTIKAKNF |
| | | | HGQCSATASLTVLPLVEEPPREVVLR |
| | | | TSGDTSLQGSFSSQSVQMSASKQEAS |
| | | | FSSFSSSSASSMTEMKFASMSAQSMS |
| | | | SMQESFVEMSSSSFMGKSSMTQLESS |
| | | | TSRMLKAGLRGIPPKIEALPSDISIDE |
| | | | GKVLTVACAFTGEPTPEITWSRGGRT |
| | | | IHDQEQRGRFMENTDDL |
| SEQ ID | NP_990445.1 | Troponin T, | MSEAEEEYEEEQPEEEEEAAAAAEEE |
| NO: 65 | (NCBI) | slow skeletal | EEEEAEASKPHEEPEEERPRPRPVVP |
| | | muscle/Gallus | QLAPPKIPEGERVDFDDIHRKRMEKD |
| | | gallus | LLELQTLIDAHFEQRRREENELVALM |
| | | | ERIERRRAERNEQLRSRTEKERERQA |
| | | | RLAEEKLRKEEEEAKKRAEDDAKKK |
| | | | KVLSNMPHFGGYLAKAEQRRGKRQ |
| | | | TGREMKLRILAERKKPLHIEHMREDE |
| | | | LRAKAKELHDWIQQLESEKFDLMEK |
| | | | LRRQKYEINVLYNRISHAQKFKKVV |
| | | | GKGRVGGRWK |
| SEQ ID | Q98916 | Slow muscle | MSEAEEEYEEEQPEEEEEAAAAAEEE |
| NO: 66 | (UniProtKB) | troponin | EEEEAEASKPHEEPEEERPRPRPVVP |
| | | T/Gallus gallus | QLAPPKIPEGERVDFDDIHRKRMEKD |
| | | | LLELQTLIDAHFEQRRREENELVALM |
| | | | ERIERRRAERNEQLRSRTEKERERQA |
| | | | RLAEEKLRKEEEEAKKRAEDDAKKK |
| | | | KVLSNMPHFGGYLAKAEQRRGKRQ |
| | | | TGREMKLRILAERKKPLHIEHMREDE |
| | | | LRAKAKELHDWIQQLESEKFDLMEK |
| | | | LRRQKYEINVLYNRISHAQKFKKVV |
| | | | GKGRVGGRWK |
| SEQ ID | XP_419242.3 | Troponin 1, slow | MPEPRERKSKITASRKLLLKSLMLAK |
| NO: 67 | (NCBI) | skeletal | AKEEWEQEIVDKQSEKERYLSERITP |
| | | muscle/Gallus | LHTSGLSLSQLQDLCRELHEKVEIVD |
| | | gallus | EERYDIEAKCNHNTREIKDLKLKVLD |
| | | | LRGKFKRPPLRRVRVSADAMLRALL |
| | | | GSKHKVSMDLRANLKSVKKEDTEK |
| | | | ERPVEVGDWRKNVEAMSGMEGRKK |
| | | | MFDAAKSPTGQ |
| SEQ ID | F1NUT9 | Troponin 11, | LPIHTSTVCLCPQSLMLAKAKEEWE |
| NO: 68 | (UniProtKB) | slow skeletal | QEIVDKQSEKERYLSERITPLHTSGLS |
| | | type/Gallus | LSQLQDLCRELHEKVEIVDEERYDIE |
| | | gallus | AKCNHNTREIKDLKLKVLDLRGKFK |
| | | | RPPLRRVRVSADAMLRALLGSKHKV |
| | | | SMDLRANLKSVKKEDTEKERPVEVG |
| | | | DWRKNVEAMSGMEGRKKMFDAAK |
| | | | SPTGQ |
| SEQ ID | NP_001001862.1 | Troponin C, | MTDQQAEARSYLSEEMIAEFKAAFD |
| NO: 69 | (NCBI) | skeletal | MFDADGGGDISVKELGTVMRMLGQ |
| | | muscle/Sus | TPTKEELDAIIEEVDEDGSGTIDFEEF |
| | | scrofa | LVMMVRQMKEDAKGKSEEELAECF |
| | | | RIFDRNADGYIDAEELAEIFRASGEH |
| | | | VTDEELESLMKDGDKNNEGRIDFDE |
| | | | FLKMMEGVQ |
| SEQ ID | B5DH00 | Fast myotomal | MSDTEEVEAQKPQFKVPKIPDGDKV |
| NO: 70 | (UniProtKB) | muscle troponin- | DFDDIQKKRQNKDLIELQALIDAHFE |
| | | T-1/Salmo salar | HRKKEEEELIALKERIEKRRAERAEQ |
| | | | NRIRSEKEKERAARREEERLKREEAD |
| | | | AKKKADEDAKKKSALSSMGSNYSS |
| | | | HLQKADSKRGGKKETEREKKKKILA |
| | | | GRRKALNIDHLNEEKLKEKAKELHE |
| | | | WMQTLESEKFDHIERLKRQKYEVTT |
| | | | LRKRVEELSKFSKKGKTVRRK |
| SEQ ID | O57559 | Troponin T | MSDTEEVEHGEAHEAEEVHEEAHHE |
| NO: 71 | (UniProtKB) | variant TnTx7- | EAHHEEAHHEEAHHAEAHHAEAHH |
| | | e16/Gallus | EEAHAHAEEVHEPAPPPEEKPRIKLT |
| | | gallus | APKIPEGEKVDFDDIQKKRQNKDLIE |
| | | | LQALIDSHFEARRKEEEELVALKERI |
| | | | EKRRAERAEQQRIRAEKEKERQARL |
| | | | AEEKARREEEDAKRKAEDDLKKKK |
| | | | ALSSMGASYSSYLAKADQKRGKKQ |
| | | | TARETKKKVLAERRKPLNIDHLNED |
| | | | KLRDKAKELWDWLYQLQTEKYDFA |
| | | | EQIKRKKYEILTLRCRLQELSKFSKK |
| | | | AGAKGKVGGRWK |
| SEQ ID | A0A287BD71 | Myotubularin | MASAPTSKYNSHSLENESIKRTSRDG |
| NO: 72 | (UniProtKB) | 1/Sus scrofa | VNRDMGEAVPRLPGETPITDKEVIYI |
| | | | CPFNGPIKGRVYITNYRLYLRSLETD |
| | | | SALILDVPLGVISRIEKMGGATSRGE |
| | | | NSYGLDITCKDMRNLRFALKQEGHS |
| | | | RRDMFEILTRYAFPLAHSLPMFAFLN |
| | | | EEKFNVDGWTVYNPVEEYRRQGLP |
| | | | NHHWRITFINKCYELCDTYPALLVVP |
| | | | YRAADEDLRRVATFRSRNRIPVLSWI |
| | | | HPENKTVIVRCSQPLVGMSGKRNKD |
| | | | DEKYLDVIRETNRQVNKLTIYDARP |
| | | | NVNAVANKATGGGYESDDAYHNAE |
| | | | LFFLDIHNIHVMRESLKKVKDIVYPN |
| | | | VEESHWLSSLESTHWLEHIKLVLTGA |
| | | | IQVADRVSSGKSSVVVHCSDGWDRT |
| | | | AQLTSLAMLMLDSFYRSIEGFEILVQ |
| | | | KEWISFGHKFASRIGHGDKNHADAD |
| | | | RSPIFLQFIDCVWQMSKQFPTAFEFN |
| | | | EHFLITILDHLYSCRFGTFLYNCESAR |
| | | | ERQKVTERTVSLWSLINSNKDKFKN |
| | | | PFYTKEINRVLYPVASMRHLELWVN |
| | | | YYIRWNPRIKQQQPNPVEQRYMELL |
| | | | ALRDEYIKRLEELQLANSAKLSEPAA |
| | | | APSSPSQMVSHVQTHF |
| SEQ ID | Q4PS85 | Myozenin-1/Sus | MPLSGTPAPNKKRKSSKLIMELTGG |
| NO: 73 | (UniProtKB) | scrofa | GQESSGLNLGKKISVPRDVMLEELSL |
| | | | LTNRGSKMFKLRQMRVEKFIYENHP |
| | | | DVFSDSSMDHFQKFLPTVGGQLGTA |
| | | | GQGFSYSKGSSGGQAGGSSSAGQYG |
| | | | SGQQHHHQGSGSGSGGAGGPGSQTG |
| | | | RGGDAGTTGVGETGTGDQAGGEGK |
| | | | HITVFKTYISPWEKAMGVDPHQKVE |
| | | | LGIDLLAYGAKAELPQYKSFNRTAM |
| | | | PYGGYEKASKRMTFQMPKFDLGPLL |
| | | | SEPLVLYNQNLSNRPSFNRTPIPWLSS |
| | | | GEPVDYNVDIGIPLDGETEEL |
| SEQ ID | XP_010712691.1 | myozenin-1 | MPLAGTPAPLKRKKPTKLIGKLTHEV |
| NO: 74 | (NCBI) | isoform | MPQEVTKLNLGKKISIPRDVMLEELS |
| | | X1/Meleagris | LLTNKGSKMFKLRQLRVEKFIYENN |
| | | gallopavo | PDAFSDNSVDHFQRFIPSGGHYGEDA |
| | | | HGYGHGRMVGGVTAGQHGSSKQH |
| | | | YSTVPPRPGSKGGPGNSEGEHAEKSA |
| | | | GSAGEGGHGTEKDGKSGGKKPLLKT |
| | | | YISPWERAMGISPEDKSQLTIDLLSYS |
| | | | PKADFP |
| | | | HYKSFNRTAMPYGGYEKAAKRMTF |
| | | | KVPQFDICPLLPESIVLYNQNFRNRPS |
| | | | FNRTPIPWMPSGESSEYHTDINVPRS |
| | | | GETEEL |
| SEQ ID | Q0III9 | Alpha-actinin- | MMMVLQPEGLGTGEGPFAGGRGGG |
| NO: 75 | (UniProtKB) | 3/Bos taurus | EYMEQEEDWDRDLLLDPAWEKQQR |
| | | | KTFTAWCNSHLRKAGTQIENIEEDFR |
| | | | NGLKLMLLLEVISGERLPRPDKGKM |
| | | | RFHKIANVNKALDFIASKGVKLVSIG |
| | | | AEEIVDGNLKMTLGMIWTIILRFAIQ |
| | | | DISVEETSAKEGLLLWCQRKTAPYR |
| | | | NVNVQNFHTSWKDGLALCALIHRHR |
| | | | PDLIDYAKLRKDDPIGNLNTAFEVAE |
| | | | KYLDIPKMLDAEDIVNTPKPDEKAIM |
| | | | TYVSCFYHAFAGAEQAETAANRICK |
| | | | VLAVNQENEKLMEEYEKLASELLEW |
| | | | IRRTVPWLENRVGEPSMSAMQRKLE |
| | | | DFRDYRRLHKPPRVQEKCQLEINFNT |
| | | | LQTKLRLSHRPAFMPSEGKLVSDIAN |
| | | | AWRGLEQAEKGYEDWLLSEIRRLQR |
| | | | LQHLAEKFQQKASLH |
| | | | EAWTRGKEDMLSQRDYETASLQEV |
| | | | RALLRRHEAFESDLAAHQDRVEHIA |
| | | | ALAQELNELDYHEAASVNSRCQAIC |
| | | | DQWDNLGTLTQKRRDALERMEKLL |
| | | | ETIDQLQLEFARRAAPFNNWLDGAV |
| | | | EDLQDVWLVHSVEETQSLVTAHDQF |
| | | | KATLPEADRERGAILGIQGEIQKICQT |
| | | | YGLRPSSTNPYITLTPQDINTKWDTV |
| | | | RKLVPSRDQMLQEELTRQQVNERLR |
| | | | RQFAAQANAIGPWIQGKVEEVGRLA |
| | | | AGMAGSLEEQMAGLRQQEQNIINYK |
| | | | SNIDRLEGDHQLLQESLVFDNKHTV |
| | | | YSMEHIRVGWEQLLTSIARTINEVEN |
| | | | QVLTRDAKGLSQEQLNEFRASFNHF |
| | | | DRKRNGMMEPDDFRACLISMGYDL |
| | | | GEVEFARIMTMVDPNAAGVVTFQAF |
| | | | IDFMTRETAETDTAEQVVA |
| | | | SFKILAGDKNYITAEELRRELPAEQA |
| | | | EYCIRRMAPYKGAGAPAGALDYVAF |
| | | | SSALYGESDL |
| SEQ ID | G3X7I1 | Alpha-actinin- | MMMVLQPEGLGTGEGPFAGGRGGG |
| NO: 76 | (UniProtKB) | 3/Bos taurus | EYMEQEEDWDRDLLLDPAWEKQQR |
| | | | KTFTAWCNSHLRKAGTQIENIEEDFR |
| | | | NGLKLMLLLEVISGERLPRPDKGKM |
| | | | RFHKIANVNKALDFIASKGVKLVSIG |
| | | | AEGEEVAGGGRWGWGRGTTICTSQ |
| | | | EQLIYQVETSAKEGLLLWCQRKTAP |
| | | | YRNVNVQNFHTSWKDGLALCALIHR |
| | | | HRPDLIDYAKLRKDDPIGNLNTAFEV |
| | | | AEKYLDIPKMLDAEDIVNTPKPDEK |
| | | | AIMTYVSCFYHAFAGAEQAETAANR |
| | | | ICKVLAVNQENEKLMEEYEKLASEL |
| | | | LEWIRRTVPWLENRVGEPSMSAMQR |
| | | | KLEDFRDYRRLHKPPRVQEKCQLEIN |
| | | | FNTLQTKLRLSHRPAFMPSEGKLVSD |
| | | | IANAWRGLEQAEKGYEDWLLSEIRR |
| | | | LQRLQHLAEKFQQKASLH |
| | | | EAWTRGKEDMLSQRDYETASLQEV |
| | | | RALLRRHEAFESDLAAHQDRVEHIA |
| | | | ALAQELNELDYHEAASVNSRCQAIC |
| | | | DQWDNLGTLTQKRRDALERMEKLL |
| | | | ETIDQLQLEFARRAAPFNNWLDGAV |
| | | | EDLQDVWLVHSVEETQSLVTAHDQF |
| | | | KATLPEADRERGAILGIQGEIQKICQT |
| | | | YGLRPSSTNPYITLTPQDINTKWDTV |
| | | | RKLVPSRDQMLQEELTRQQVNERLR |
| | | | RQFAAQANAIGPWIQGKVEEVGRLA |
| | | | AGMAGSLEEQMAGLRQQEQNIINYK |
| | | | SNIDRLEGDHQLLQESLVFDNKHTV |
| | | | YSMEHIRVGWEQLLTSIARTINEVEN |
| | | | QVLTRDAKGLSQEQLNEFRASFNHF |
| | | | DRKRNGMMEPDDFRACLISMGYDL |
| | | | GEVEFARIMTMVDPNAAGVVTFQAF |
| | | | IDFMTRETAETDTAEQVVA |
| | | | SFKILAGDKNYITAEELRRELPAEQA |
| | | | EYCIRRMAPYKGAGAPAGALDYVAF |
| | | | SSALYGESDL |
| SEQ ID | Q3ZC55 | Alpha-actinin- | MNQIEPGVQYNYVYEDDEYMIQEEE |
| NO: 77 | (UniProtKB) | 2/Bos taurus | WDRDLLLDPAWEKQQRKTFTAWCN |
| | | | SHLRKAGTQIENIEEDFRNGLKLMLL |
| | | | LEVISGERLPKPDRGKMRFHKIANVN |
| | | | KALDYIASKGVKLVSIGAEEIVDGNV |
| | | | KMTLGMIWTIILRFAIQDISVEETSAK |
| | | | EGLLLWCQRKTAPYRNVNIQNFHTS |
| | | | WKDGLGLCALIHRHRPDLIDYSKLN |
| | | | KDDPIGNINLAMEIAEKHLDIPKMLD |
| | | | AEDIVNTPKPDERAIMTYVSCFYHAF |
| | | | AGAEQAETAANRICKVLAVNQENER |
| | | | LMEEYERLASELLEWIRRTIPWLENR |
| | | | TPEKTMQAMQKKLEDFRDYRRKHK |
| | | | PPKVQEKCQLEINFNTLQTKLRISNRP |
| | | | AFMPSEGKMVSDIAGAWQRLEQAE |
| | | | KGYEEWLLNEIRRLERVEHLAEKFR |
| | | | QKASTHETWAYGK |
| | | | EQILLQKDYESSTLTEVRALLRKHEA |
| | | | FESDLAAHQDRVEQIAAIAQELNELD |
| | | | YHDAVNVNDRCQKICDQWDRLGTL |
| | | | TQKRREALERTEKLLETIDQLHLEFA |
| | | | KRAAPFNNWMEGAMEDLQDMFIVH |
| | | | SIEEIQSLITAHEQFKATLPEADGERQ |
| | | | SILAIQNEVEKVIQSYSIRISSSNPYST |
| | | | VTVDEIRSKWDKVKQLVPIRDQSLQ |
| | | | EELARQHANERLRRQFAAQANAIGP |
| | | | WIQNKMEEIARSSIQITGALEDQMNQ |
| | | | LKQYEHNIINYKNNIDKLEGDHQLIQ |
| | | | EALVFDNKHTNYTMEHIRVGWELLL |
| | | | TTIARTINEVETQILTRDAKGITQEQM |
| | | | NEFRASFNHFDRRKNGLMDHEDFRA |
| | | | CLISMGYDLGEAEFARIMTLVDPNG |
| | | | QGTVTFQSFIDFMTRETADTDTAEQV |
| | | | IASFRILAS |
| | | | DKPYILAEELRRELPPDQAQYCIKRM |
| | | | PAYSGPGSVPGALDYTAFSSALYGES |
| | | | DL |
| SEQ ID | A0A1S3L6D5 | SALSA M- | MATKVMHFNQKKHVSHVSHHSSHT |
| NO: 78 | (UniProtKB) | protein, striated | TKHVVKEQSSRKSSSKSVNQVQHTH |
| | | muscle isoform | ATEAMAEPAYTVPAFRQRSADEIEE |
| | | X3/Salmo salar | YQRVSSHVGKGLASIQKELHRMRVV |
| | | | TKTQVENIAIKREVQEMMHKKMTLS |
| | | | TETDKAPDFMVALRPHTVWEKTPVK |
| | | | LFCTVDGHPRPIVKWYKGGKPVDPL |
| | | | SAPGKYKIESKYGVHSLIISRCMVSD |
| | | | TAEYSAVATNSHGSTTSKASVIVKRP |
| | | | AGGAYGSCQLFGQVPHLTVIHHSKL |
| | | | EITMLDRFGVSFGTEGGSISLVCTMV |
| | | | VVPDLPNVPPLAQWYRDDKLLKAG |
| | | | KLAEIKVGGGAATLTLPHLAKDDEG |
| | | | LYTLRMWTKDGTTEHSAYLFVKDA |
| | | | APSVAGAPGAPISVKAFDINSDYVLV |
| | | | AWKPPNTTNEAAITGYFVDKRESGS |
| | | | ATWSQCNDAPVQICKYPVH |
| | | | GLNVGHAYHFRVRAVNSAGISRPSR |
| | | | ESDKVTALDPAERERLQVIKLDGKH |
| | | | EVVIKDDDLEGVPSAPGQVVATRNT |
| | | | KSSVFVQWDPPKHPNHLMGYYIDAS |
| | | | LVGSKTWAPCNHKPYKNTRFVVHG |
| | | | LTPGETYVFRVQAVNVYGLSDESQE |
| | | | STPIAVEPALTTPSAPHGITMLSCDGA |
| | | | SMIIAWNSPKHRGGSKINAYYVDKR |
| | | | DADSLAWKEVNSAPTNTRTYTVDGL |
| | | | TEGTFYEFKVQAGNLAGVGVPSAPS |
| | | | TPLKCEAWTSAVPGPAYDLAFREVR |
| | | | GDSLVILWKAPVYTGASAVTGYIVE |
| | | | MAKKGHHYHPLNEEAIGHCYLQVT |
| | | | GLEAGAEYTFKVKAVNAEGVGKAS |
| | | | QTSEPVFAKALPGTQEIQCGVDEDTG |
| | | | DIFLSFEACEISETSNFAWSKNYKEIS |
| | | | DCTRVSIETKGKHSKLTF |
| | | | VNPDVSDLGAFSVHVTDTDGVSASH |
| | | | TVTEDALNTMLELSYNIRHPIVPLKH |
| | | | QLNYEVLEKGHVRFWLQCLKMSPA |
| | | | VNYRFIVNDKEVTSSDSHKISHDVNT |
| | | | GVIQMTVDHFSKASEATYTVQIHDG |
| | | | RAKNQSSLVLVGDVFKAALKEAEFQ |
| | | | RSEHIRKQGPHFAEYLSYHVDDDCT |
| | | | VLLVCKVANVKKETVFHWFKDEEEI |
| | | | VPETPPNVMSGSVALPISLFSRKDQG |
| | | | HYKAKLSDDRGKDTSVFDISGQVFD |
| | | | DIINAIAHIAGSSASELVLQCTPEGIRL |
| | | | QCYMKYYTEEIRTAWLHKDSKISSSE |
| | | | KMRIAGTAEMAWMQIREPSEKEKG |
| | | | HYSIQIMDATKSHTRTFDLSGQAYTD |
| | | | AYEEYLRLKAAAFAEKNRGRVVGG |
| | | | LPDVVTIMEQKTLSLTCTVWGDPSPE |
| | | | VTWFKNENEVVSTE |
| | | | HAKITLEANKFASLTITAVTSEDSGK |
| | | | YSINVRNKYGGEFVEITVSVYKQGES |
| | | | PPEPKMGGRGATPAPLASKTPAKTPT |
| | | | PAQTPTPSLKSPTPSLKSPTPSLRSPA |
| | | | KSPTPTPKSPTPPRRVKSPSPARSLKS |
| | | | PTPPRK |
| SEQ ID | P19352 | Tropomyosin | MEAIKKKMQMLKLDKENAIDRAEQ |
| NO: 79 | (UniProtKB) | beta | AEADKKQAEDRCKQLEEEQQGLQK |
| | | chain/Gallus | KLKGTEDEVEKYSESVKEAQEKLEQ |
| | | gallus | AEKKATDAEAEVASLNRRIQLVEEE |
| | | | LDRAQERLATALQKLEEAEKAADES |
| | | | ERGMKVIENRAMKDEEKMELQEMQ |
| | | | LKEAKHIAEEADRKYEEVARKLVVL |
| | | | EGELERSEERAEVAESKCGDLEEELK |
| | | | IVTNNLKSLEAQADKYSTKEDKYEE |
| | | | EIKLLGEKLKEAETRAEFAERSVAKL |
| | | | EKTIDDLEDEVYAQKMKYKAISEEL |
| | | | DNALNDITSL |
| SEQ ID | Q3ZC09 | Beta- | MAMQKIFAREILDSRGNPTVEVDLH |
| NO: 80 | (UniProtKB) | enolase/Bos | TAKGRFRAAVPSGASTGIYEALELRD |
| | | taurus | GDKSRYLGKGVLKAVEHINKTLGPA |
| | | | LLEKKLSVVDQEKVDKFMIELDGTE |
| | | | NKSKFGANAILGVSLAVCKAGAAEK |
| | | | GVPLYRHIADLAGNPELILPVPAFNVI |
| | | | NGGSHAGNKLAMQEFMILPVGASSF |
| | | | REAMRIGAEVYHHLKGVIKAKYGK |
| | | | DATNVGDEGGFAPNILENNEALELL |
| | | | KTAIQAAGYPDKVVIGMDVAASEFY |
| | | | RNGKYDLDFKSPDDPARHISGEKLG |
| | | | ELYKNFIKNYPVVSIEDPFDQDDWAT |
| | | | WTSFLSGVNIQIVGDDLTVTNPKRIA |
| | | | QAVEKKACNCLLLKVNQIGSVTESIQ |
| | | | ACKLAQSNGWGVMVSHRSGETEDT |
| | | | FIADLVVGLCTGQIKTGAPCRSERLA |
| | | | KYNQLMRIEEALGDKAVFAGRKFRN |
| | | | PKAK |
| SEQ ID | Q1AG05 | Calsarcin 3/Sus | MIPKEQKGPVVTAMGDLTEPAPLLD |
| NO: 81 | (UniProtKB) | scrofa | LGKKLSVPQDLMVEELSLPNNRGSL |
| | | | LFQERQRRVQKFTFEFAGSQRASAA |
| | | | GTAQGTVTATATPGRAANSPEGQNY |
| | | | SSELHVSLESPGGPEDVQPAAPRAVS |
| | | | APRPSALAPGYAEPLKGIPPEKFNHT |
| | | | AIPKGYRCPWQEFISYRDYLGEGRSH |
| | | | TPSLADYRNFNKTPVPFGGLLAGETL |
| | | | PRAGTPSVPELSSGLELLRLRPSFNRV |
| | | | AQGWVRNLPESEEL |
| SEQ ID | Q1AG02 | Calsarcin | MPLSGTPAPNKKRKSSKLIMELTGG |
| NO: 82 | (UniProtKB) | 2/Oryctolagus | GQESSGLNLGKKISVPRDVMLEELSL |
| | | cuniculus | LTNRGSKMFKLRQMRVEKFIYENHP |
| | | | DVFSDSSMDHFQKFLPTVGGQLGTA |
| | | | GQGVSYSKGSGGGQAGGSGSAGQY |
| | | | GSDHQHHHGSGSGAGGAGGPGGQA |
| | | | GKGGAAGAGGVGETGSGDQTGGDG |
| | | | KHITVFKTYISPWEQPWGVDPQQKV |
| | | | ELGIDLLAYGAKAELPKYKSFNRTA |
| | | | MPYGGYEKASKRMTFQMPKFDLGP |
| | | | LLSEPLVLYNQNLSNRPSFNRTPIPW |
| | | | LSSGEHADYHVDIGIPLDGETEEL |
| SEQ ID | A6QLT4 | Myotubularin | MASAPTSKYNSHSLENESIKRTSRDG |
| NO: 83 | (UniProtKB) | OS = Bos taurus | VNRDVGETLPRLPGEIRITDKEVIYIC |
| | | | PFNGPIKGRVYITNYRLYLRSLETDS |
| | | | ALILDVPLGVISRIEKMGGATSRGEN |
| | | | SYGLDITCKDLRNLRFALKQEGHSRR |
| | | | DMFEILTRYAFPLAHSLPIFAFLNEEK |
| | | | FNVDGWTVYNPVEEYRRQGLPNHH |
| | | | WRITFINKCYKLCDTYPALLVVPYRA |
| | | | SDEDLRRVATFRSRNRIPVLSWIHPE |
| | | | NKTVIVRCSQPLVGMSGKRNKEDER |
| | | | YLDVIRETNRQVNKLTIYDARPNVN |
| | | | AVANKATGGGYESDDVYHNAELFF |
| | | | LDIHNIHVMRESLKKVKDIVYPNVEE |
| | | | SHWLSSLESTHWLEHIKLVLTGAIQV |
| | | | ADRVSSGKSSVVVHCSDGWDRTAQ |
| | | | LTSLAMLMLDSFYRSIEGFEILVQKE |
| | | | WISFGHKFASRIGHGDKNHADADRS |
| | | | PIFLQFIDCVWQMSKQFPTAFEFNER |
| | | | FLITILDHLYSCRFGTFLYNCESAREK |
| | | | QKVTERTVSLWSLINSNKDKFKNPF |
| | | | YTKEINRVLYPVASMRHLELWVNYY |
| | | | IRWNPRIKQQQPNPVEQRYMELLAL |
| | | | RDEYIKRLDELQLANSAKLSDPSASP |
| | | | SSPSQMMPHVQTHF |
| SEQ ID | Q7YS81 | Myogenin/Bos | MELYETSPYFYQEPHFYDGENYLPV |
| NO: 84 | (UniProtKB) | taurus | HLQGFEPPGYERAELSLSPEARVPLE |
| | | | DKGLGPAEHCPGQCLPWACKVCKR |
| | | | KSVSVDRRRAATLREKRRLKKVNEA |
| | | | FEALKRSTLLNPNQRLPKVEILRSAIQ |
| | | | YIERLQALLSSLNQEERDLRYRGGGG |
| | | | PQAAVPSECSSHSASCSPQWGSALEF |
| | | | GPNPGDHLLPADPTDAHNLHSLTSIV |
| | | | DSITVEDVAAAFPDETIPN |
| SEQ ID | P49812 | Myogenin/Sus | MELYETSPYFYQEPHFYDGENYLPV |
| NO: 85 | (UniProtKB) | scrofa | HLQGFEPPGYERTELSLSPEARVPLE |
| | | | DKGLGTPEHCPGQCLPWACKVCKR |
| | | | KSVSVDRRRAATLREKRRLKKVNEA |
| | | | FEALKRSTLLNPNQRLPKVEILRSAIQ |
| | | | YIERLQALLSSLNQEERDLRYRGGGG |
| | | | PQPGVPSECSSHSASCSPEWGSALEF |
| | | | GPNPGDHLLTADPTDAHNLHSLTSIV |
| | | | DSITVEDVAVAFPDETMPN |
| SEQ ID | P31696-5 | Agrin Isoform | MGGSGAAATLALGLALGLALGGWA |
| NO: 86 | (UniProtKB) | 5/Gallus gallus | NCPERELQRREEEANVVLTGTVEEIM |
| | | | NVDPVHHTYSCKVRVWRYLKGKDI |
| | | | VTHEILLDGGNKVVIGGFGDPLICDN |
| | | | QVSTGDTRIFFVNPAPQYMWPAHRN |
| | | | ELMLNSSLMRITLRNLEEVEHCVEEH |
| | | | RKLLADKPNSYFTQTPPTPRDACRG |
| | | | MLCGFGAVCERSPTDPSQASCVCKK |
| | | | TACPVVVAPVCGSDYSTYSNECELE |
| | | | KAQCNQQRRIKVISKGPCGSKDPCAE |
| | | | VTCSFGSTCVRSADGQTAGCVCPAS |
| | | | CSGVAESIVCGSDGKDYRSECDLNK |
| | | | HACDKQENVFKKFDGACDPCKGILN |
| | | | DMNRVCRVNPRTRRVELLSRPENCP |
| | | | SKREPVCGDDGVTYASECVMGRTG |
| | | | AIRGLEIQKVRSGQCQHQDKCKDEC |
| | | | KFNAVCLKRWHARCSCDRITCDGTY |
| | | | RPVCARDSRTYSNDCERQKAECHQK |
| | | | AAIPVKHSGPCDLGTPSPCLSVECTF |
| | | | GATCVVKNREPVCECQQVCQGRYD |
| | | | PVCGSDNRTYGNPCELNAMACVLK |
| | | | REIRVKHKGPCDRCGKCQFGAICEAE |
| | | | TGRCVCPTECVPSSQPVCGTDGNTY |
| | | | GSECELHVRACTQQKNILVAAQGDC |
| | | | KSCGTTVCSFGSTCVGGQCVCPRCE |
| | | | QQPLAQVCGTDGLTYDNRCELRAAS |
| | | | CQQQKSIEVAKMGPCEDECGSGGSG |
| | | | SGDGSECEQDRCRHYGGWWDEDAE |
| | | | DDRCVCDFTCLAVPRSPVCGSDDVT |
| | | | YANECELKKTRCEKRQNLYVTSQGA |
| | | | CRALTTTPPPLPVVHCSQTIYGCCPD |
| | | | NMTLALGVGAAGCPSTCQCNPYGSY |
| | | | GGTCDPATGQCSCKPGVGGLKCDRC |
| | | | EPGFWNFRGIVTDSKSGCTPCNCDPV |
| | | | GSVRDDCEQMTGLCSCKTGITGMKC |
| | | | NQCPNGSKMGMAGCEKDPSAPKSC |
| | | | EEMSCEFGATCVEVNGFAHCECPSPL |
| | | | CSEANMTKVCGSDGVTYGDQCQLK |
| | | | TIACRQGQLITVKHVGQCHESITHTS |
| | | | HTMPPTPLPTLPLDKLIVPPPLQLTTQ |
| | | | APEPTELATTSLLMEASPTTRSHPTTR |
| | | | RVTTTRPVTTPWMTHGVLKTTVRPL |
| | | | STSPVVLATTQPPYAESGSAEGSGDQ |
| | | | EMSISGDQESSGAGSAGEEEVEESQV |
| | | | TPTPAIERATCYNTPLGCCSDGKTAA |
| | | | ADAEGSNCPATKVFQGVLILEEVEG |
| | | | QELFYTPEMADPKSELFGETARSIES |
| | | | ALDELFRNSDVKNDFKSIRVRDLGQS |
| | | | SAVRVIVESHFDPATSYTAADVQAA |
| | | | SLKQIRASKKRTILVKKPQQEHVKFM |
| | | | DFDWIPRIFTTTITTTTATTMAPATTR |
| | | | RHTTASAATTAHILRQDTVGHPSAK |
| | | | LAAPASTRRPTSTLPTTARRKPTRQP |
| | | | PSTTKKPSRPCDSHPCLHGGTCEDDG |
| | | | REFTCRCPAGKGGAVCEKPIRYFIPSF |
| | | | GGKSYLAFKMMKAYHTVRIAMEFR |
| | | | ATELSGLLLYNGQNRGKDFISLALVG |
| | | | GFVELRFNTGSGTGVITSKVRVEPGK |
| | | | WHQLVVNRNRRSGMLAVDGEHVSG |
| | | | ESPTGTDGLNLDTDLFVGGAPEDQM |
| | | | AVVAERTAATVGLKGSIRLLDVNNQ |
| | | | MYDLREKGSDVLYGSGVGECGNDP |
| | | | CHPNPCHHGASCHVKEAEMFHCECL |
| | | | HSYTGPTCADERNPCDPTPCHISATC |
| | | | LVLPEGGAMCACPMGREGEFCERVT |
| | | | EQDHTMPFLPEFNGFSYLELNGLQTL |
| | | | FLTCRQMSMEVVFLAKSPSGMIFYN |
| | | | GQKTDGKGDFVSLALHDGYLEYRY |
| | | | DLGKGAAVLRSKEPVPLNTWISVLL |
| | | | ERSGRKGVMRINNGERVMGESPVPH |
| | | | AFLNLKEPFYVGGAPDFSKLARAAAI |
| | | | STSFYGAVQRISIKGVPLLKEQHIRSA |
| | | | VEISTFRAHPCTQKPNPCQNGGTCSP |
| | | | RLESYECACQRGFSGAHCEKVIIEKA |
| | | | AGDAEAIAFDGRTYMEYHNAVTKSE |
| | | | KALQSNHFELSIKTEATQGLILWSGK |
| | | | GLERSDYIALAIVDGFVQMMYDLGS |
| | | | KPVVLRSTVPINTNHWTHIKAYRVQ |
| | | | REGSLQVGNEAPITGSSPLGATQLDT |
| | | | DGALWLGGMERLSVAHKLPKAYST |
| | | | GFIGCIRDVIVDRQELHLVEDALNNP |
| | | | TILHCSAK |
| SEQ ID | NP_001004406.1 | Cofilin-2/Gallus | MASGVTVNDEVIKVFNDMKVRKSST |
| NO: 87 | (NCBI) | gallus | PEEIKKRKKAVLFCLSDDKKQIIVEE |
| | | | ATRILVGDIGDTVEDPYTAFVKLLPL |
| | | | NDCRYALYDATYETKESKKEDLVFI |
| | | | FWAPESAPLKSKMIYASSKDAIKKKF |
| | | | TGIKHEWQVNGLDDIKDRSTLGEKL |
| | | | GGNVVVSLEGKPL |
| SEQ ID | P21566 | Cofilin-2/Gallus | MASGVTVNDEVIKVFNDMKVRKSST |
| NO: 88 | (UniProtKB) | gallus | PEEIKKRKKAVLFCLSDDKKQIIVEE |
| | | | AKQILVGDIGDTVEDPYTAFVKLLPL |
| | | | NDCRYALYDATYETKESKKEDLVFI |
| | | | FWAPESAPLKSKMIYASSKDAIKKKF |
| | | | TGIKHEWQVNGLDDIKDRSTLGEKL |
| | | | GGNVVVSLEGKPL |
| SEQ ID | Q679P3 | PDZ and LIM | MESYKVMLNGPAPWGFRLQGGKDF |
| NO: 89 | (UniProtKB) | domain protein | SMPLSISRLTPGGKAAQAGVGVGDW |
| | | 7/Gallus gallus | VLYIDGESTGTMTHIEAQNRIRACGD |
| | | | RLCLTLSRAQNHLGKPQKDSLPCSEP |
| | | | PKYNFAPSTALNKTARPFGASSPPNP |
| | | | RPGLVTKPVTYVPLAPACTPQHNGQ |
| | | | VSVPDPSPGAAMKTEPGLAPRTPAA |
| | | | TPGPTSRPPWAVDPSFAERYAPDKTS |
| | | | TVLSKHSQPATPTPMQNRSSIVQAAQ |
| | | | QAPESPGRTPLCYKCNKIIRGRYLVA |
| | | | LGHYYHPEEFTCCQCRKVLDEGGFF |
| | | | EEKGSIFCPKCYDTRYAPSCAKCKKK |
| | | | ITGEVMHALKMTWHVQCFTCAACK |
| | | | TPIRNRAFYMEEGQPYCERDYEKMF |
| | | | GTKCRGCDFKIDAGDRFLEALGFSW |
| | | | HDTCFVCAICQTNLEGKTFYSKKDK |
| | | | PLCKSHAFSHV |
| SEQ ID | F1NQD9 | Radixin/Gallus | MPKPINVRVTTMDAELEFAIQPNTTG |
| NO: 90 | (UniProtKB) | gallus | KQLFDQVVKTVGLREVWFFGLQYV |
| | | | DSKGYSTWLKLNKKVTQQDVRKEN |
| | | | PLQFKFRAKFFPEDVSEELIQEITQRL |
| | | | FFLQVKEAILNDEIYCPPETAVLLASY |
| | | | AVQSKYGDYNKEIHKLGYLANDRLL |
| | | | PQRVLEQHKLTKEQWEERIQNWHEE |
| | | | HRGMLREDSMMEYLKIAQDLEMYG |
| | | | VNYFEIKNKKGTELWLGVDALGLNI |
| | | | YEHDDKLTPKIGFPWSEIRNISFNDK |
| | | | KFVIKPIDKKAPDFVFYAPRLRINKRI |
| | | | LALCMGNHELYMRRRKPDTIEVQQ |
| | | | MKAQAREEKHQKQLERAQLENEKK |
| | | | KREIAEKEKERIEREKEELMERLRQIE |
| | | | EQTMKAQKELEEQTRRALELDQERK |
| | | | RAKEEAERLEKERRAAEEAKAALAK |
| | | | QAADQMKNQEQLAAELAEFTAKIAL |
| | | | LEEAKKKKEEEASEWQHKAFAAQE |
| | | | DLEKTKEELKSVMSAPPPPPPPPVIPP |
| | | | TENEHDEHDENNAEASAELSSDGVM |
| | | | NHRSEEERVTETQKNERVKKQLQAL |
| | | | SSELAQARDETKKTQNDVLHAENVK |
| | | | AGRDKYKTLRQIRQGNTKQRIDEFE |
| | | | AM |
| SEQ ID | XP_025008315.1 | nebulin isoform | MEEEEYEEVVEYYIEETIVEEGEPYE |
| NO: 91 | (NCBI) | X22/Gallus | VVTEITDSTSTEFTGPTTITRTIEYEKT |
| | | gallus | SGEGAATPVRKKTIRTKMDTSKFLTP |
| | | | YLQHSNKMKDLFSENKYKEKFNKER |
| | | | GKPYASTIDTPEIRRIKKVQEQLSEVK |
| | | | YRMAGEAARTICHVDEKAWDIEHA |
| | | | KKVSQQVSKVLYKQNWEENKDKYL |
| | | | LPPDAPELVNAIKNTAMFSKKLYTED |
| | | | WEGDKTLFYPYNDSPELRRVAQAQK |
| | | | ALSDIVYKKGHDERKSKYTSLPDPPD |
| | | | VEQAKKVTRQLSDIIYHDDYKNKIK |
| | | | GKWSQTPCYDVVIAKMNAENLSMK |
| | | | KYQEDFENVKDQIYFMQTETPEYEA |
| | | | NKRVSDNVSKIKYRADYEKNKAIAD |
| | | | YNVLPATENPLLRQLKTAGDVLSDK |
| | | | LYKEAYERSKGTSMNYCETPKFQTD |
| | | | NALKNFSDVKYKDAYQKNILGHYL |
| | | | GSFEDPHQIHCMKVEAMKSDKNYK |
| | | | ADYEEEKTKCYFPQTITQEYEAIKKL |
| | | | EQCKDHTYKKHPDQIKFTPVTDSPV |
| | | | QKQAEINSKQLSDKLYRSSGEEVKH |
| | | | KYTLPPDVPQFIQARYNAANVSDAY |
| | | | YKQDYHDLIAKGNNVSLDAIPITRAK |
| | | | ASRNIASDYKYKEAYEKAKGQQVGF |
| | | | KSLQDDPKLVHYMHVAKIQSDREYK |
| | | | KDYEKSKTNYHTPPDTFSIQAAKKSQ |
| | | | DVASTAHYKNLIHHYTYLPDAMDVE |
| | | | LAKNMMQIQSDNVYKQDYNSWFKG |
| | | | IGWSPLGSLDVEKAKKAGDALNEKK |
| | | | YRQHPDTIKFTSVPDSMTMVLAQHN |
| | | | TKQLSDVAYKQEGEKVKHKYKLDP |
| | | | DVPQFIQARVNAFNLSDANYKADW |
| | | | KKTIAKGYDLKPDAIPIIAAKASRNIA |
| | | | SDYKYKESYEKDKGRQVGYRSLQD |
| | | | DPKLVHYMHVAKMQSDREYKKDYE |
| | | | VTKTKYHTPLDMFSVTAAKKAQEA |
| | | | VTNTGYKQLIHHYTLLPDSVNLELSR |
| | | | NMMQLQSDNMYKADFNNWLRGVG |
| | | | WLPIQSLEVEKAKKASEILSEKKYRQ |
| | | | HPDKLKYSIPLDAMEQVLAKQNAKT |
| | | | MNKRLYTDKWNKEKTSIHVMPDTP |
| | | | EILQSRVNQITMSNKLYKAGWEEDK |
| | | | KKGYDMRPDAIPIKAAKTSQDIASDY |
| | | | KYKLAHEKAKGKHIGFRSLEDDPKL |
| | | | VHFMQVAKMQSDREYKKDYEKAKT |
| | | | NFHTPVDMLSVVAAKKAQEVATNA |
| | | | NYKNLIHVYNVLPDAMSLELAKNM |
| | | | MQIQSNNQYRAEYDESMKGVGWMP |
| | | | LGSLEAEKNKKAMEILSEKKYRQHP |
| | | | DKLKYSVPVDSMNMALALHNAKIM |
| | | | DEHQYKQAWEEDKKKVHMTPDIPQ |
| | | | FALAKANAFNISDKMYRHSFEEARK |
| | | | KGYDLRSDAIPIKAAKASRDIASDYK |
| | | | YKLGYEQDKGKLVGFRSLQDDPKLV |
| | | | HYMQVAKMQSDREYKKAYETSKTH |
| | | | YQTPSDALSIMAAKEAQDRVTNANY |
| | | | KRLIHHYMLLPDAMSFELYRNMNQI |
| | | | QSNNEYKQDYNEWFKGIGWSPAGSL |
| | | | DVEKSKKATEIASDQKYRQHPSIFPF |
| | | | TKQIDAMDMVLAKHNADIMNKHAY |
| | | | TQAWEKDKTQVHVMPDTPDILQAK |
| | | | QNKANYSQKQYKLDWQEMIKKGYD |
| | | | LTPEAISVKAAKASRDIASDYKYKEG |
| | | | YRKQQGHHIGFRSLQDDPKMMWSM |
| | | | QVAKMQSEREYKKDFEKWKTKFNM |
| | | | PVDMLGFLLAKKCQELVSDIDYKHM |
| | | | LHRWTCLPDQNDVTQAKRVYELQS |
| | | | DNLYKSDLQWLRGIGWSPLGSLESE |
| | | | KNKKASEILSEKKYRQHPDTIKFTSIP |
| | | | DAMNIILAKSNAKNRSDILYREAWD |
| | | | KDKTQVHIMPDTPEILLAKSNLINTS |
| | | | DKHYKLGYEELRRKGYDLPPDAIPL |
| | | | KSAKASRDIASEYQYKTAYRKQLGH |
| | | | HVGARNIEDDPKMMWSMHVAKIQS |
| | | | DREYKKAFEKTKTHFSSPVDMLGIV |
| | | | LAKKCQELVSDVDYKHLLHRWTCL |
| | | | PDQNDVVQARKVYDLQSDNVYKSD |
| | | | LQWLRGIGWSPLGSLDEEKNKRASM |
| | | | ILSDKKYRQHPDTIKFTSLPDSMPMV |
| | | | LAKHNSEIMNHRSYIAAWEKDKTSI |
| | | | HIMPDTPGILLAQQNKVNYSEKMYR |
| | | | LAMEEDKKKGYDLRADAIPIKAAKA |
| | | | SRDIASDYKYKEGYRKQLGHHIGAR |
| | | | NIEDDPKMMWSMHVAKVQSDREYK |
| | | | KAFEKTKTHFSSPVDMLGIVLAKKC |
| | | | QELVSDVDYKHLLHRWTCLPDQND |
| | | | VVQARKVYDLQSDNVYKSDLQWLR |
| | | | GIGWSPLGSLDEEKNKRASMILSDKK |
| | | | YRQHPDTIKFTSLPDSMPMVLAKHN |
| | | | SEIMNHRSYIAAWEKDKTSIHIMPDT |
| | | | PGILLAQQNKVNYSEKMYRLAMEED |
| | | | KKKGYDLRADAIPIKAAKASRDIASD |
| | | | YKYKEGYRKQLGHHIGARNIEDDPK |
| | | | MMWSMHVAKVQSDREYKKAFEKT |
| | | | KTHFSSPVDMLGIVLAKKCQELVSD |
| | | | VDYKHLLHRWTCLPDQNDVVQARK |
| | | | VYDLQSDNVYKSDLQWLRGIGWSPL |
| | | | GSLDEEKNKRASMILSDKKYRQHPD |
| | | | TIKFTSLPDSMPMVLAKHNSEIMNHR |
| | | | SYIAAWEKDKTSIHIMPDTPGILLAQ |
| | | | QNKVNYSEKMYRLAMEEDKKKGY |
| | | | DLRADAIPIKAAKASRDIASDYKYKE |
| | | | GYRKQLGHHIGARNIEDDPKMMWS |
| | | | MHVAKVQSDREYKKAFEKTKTHFSS |
| | | | PVDMLGIVLAKKCQELVSDVDYKHL |
| | | | LHRWTCLPDQNDVVQARKVYDLQS |
| | | | DNVYKSDLQWLRGIGWSPLGSLDEE |
| | | | KNKRASMILSDKKYRQHPDTIKFTSL |
| | | | PDSMPMVLAKHNSEIMNHRSYIAAW |
| | | | EKDKTSIHIMPDTPGILLAQQNKVNY |
| | | | SEKMYRLAMEEDKKKGYDLRADAI |
| | | | PIKAAKASRDIASDYKYKEGYRKQL |
| | | | GHHIGARNIEDDPKMMWSMHVAKI |
| | | | QSDREYKKAFEKTKTHFSSPVDMLGI |
| | | | VLAKKCQELVSDVDYRHYLHQWIC |
| | | | LPDQNDVIHARKAYDLQSDNFYKSD |
| | | | LEWMRGIGWVPIGSLDIEKAKRAGQI |
| | | | LSDKVYRQPPDTIKFTSVTDSLEMTL |
| | | | AKHNAEMMNKRLYTEAWDKDKTQI |
| | | | HIMPDTPEITLAKQNMHNYSEKLYK |
| | | | QAMEEAKKKGYDLRSDAIPIQAAKA |
| | | | SRQIASDYKYKEGYRKQLGHHIGAR |
| | | | NIEDDPKMMWSMHVAKIQSDREYK |
| | | | KAFEKTKTHFSSPVDMLGIVLAKKC |
| | | | QELVSDVDYRHYLHQWICLPDQND |
| | | | VIHARKAYDLQSDNFYKSDLEWMR |
| | | | GIGWVPIGSLDVEKAKRAGQILSDKV |
| | | | YRQPPDTIKFTSVTDSLEMTLAKHNA |
| | | | ETMNKRLYTEAWNKDKTTIHVMPD |
| | | | TPEILLAKQNQAHYSQKMYKLALEE |
| | | | SKKKGHDLRFDAIPIQAAKASREIAS |
| | | | DYKYKEGYRKQLGHHIGARNIEDDP |
| | | | KMMWSMHVAKIQSDREYKKAFEKT |
| | | | KTHFSSPVDMLGIVLAKKCQELVSD |
| | | | VDYRHYLHQWICLPDQNDVIHARKA |
| | | | YDLQSDAVYKSDLEWLKGIGWVPIG |
| | | | SLDVEKAKKAGEILSDRKYRQPADQI |
| | | | KFTSVTDSLAMMLAKHNAEIMNKRL |
| | | | YTEAWDADKTSIHVMPDTPTILLAK |
| | | | ANAANVSHKHYVQAWEDAKKKGY |
| | | | DMRADAIPIRSAKASRDIASDYKYKE |
| | | | AHEKQKGHYIGCRTAKEDPKLSWA |
| | | | ARAMLLQNDRIYRKAYNDSKAHIH |
| | | | MPVDAMSLQAAKECQTLVSDVDYR |
| | | | HYLHQWTCLPDQNDVMHARKAYD |
| | | | LQSDNVYKSDLEWLRGIGWLTEGSV |
| | | | DVIKAKKAQEILSDRLYRTQPDKMK |
| | | | FTSITDTPDVVQAKINAMQLSNHLYR |
| | | | EVWDKDKTQISIPSDTPELLQSKLNA |
| | | | LNISNKHYQKAWDEAKAKNYDLRA |
| | | | DAIPIKHAKASRDIASEYKYKEAHEK |
| | | | QKGHYIGCRTAKEDPKLSWAARAM |
| | | | LLQNDRIYRKAYNDSKAHIHMPVDA |
| | | | MSLQAAKECQTLVSDVDYRHYLHQ |
| | | | WTCLPDQNDVMHARKAYDLQSDNV |
| | | | YKSDLEWLRGIGWLTEGSVDVVKA |
| | | | KKAQEILSDRLYRTQPDKMKFTSVT |
| | | | DAPDVVQAKINAMQLSNRLYREAW |
| | | | DKDKTQISIPSDTPEMLQSKVNALNIS |
| | | | NKHYQKAWDEAKAKNYDLRADAIP |
| | | | IKHAKASRDIASEYKYKEAHEKQKG |
| | | | HYIGCRTAKEDPKLSWAARAMLLQ |
| | | | NDRIYRKAYNDSKAHIHMPVDAMSL |
| | | | QAAKECQTLVSDVDYRHYLHQWTC |
| | | | LPDHNDVVHARKAYDLQSDAVYKS |
| | | | DLEWLRGIGWLPNDSPGVQRVKHA |
| | | | QDLLSDKVYRTPIDSVKYTSVVDSPD |
| | | | ILLAKMNAEQLSIPKYKEAWEKDKT |
| | | | MIHIMPDTPEITLARSNAHNYSQKLY |
| | | | KEAWDEVKMSYDLRADAIPIKAAKA |
| | | | SREIASDYKYKLDHEKQKGHYVGVP |
| | | | NAKADTKIRFALGIGKVQSELEYKK |
| | | | HFAKWKTQCHLPVDMLSIQSAKHG |
| | | | QSLVSDVDYRHYLHQWICLPDQNDV |
| | | | IHARKAYDLQSDAVYKSDLEWLRGI |
| | | | GWLPNDSLGINHVKHAGDLLNERKY |
| | | | RTKAETLHFTPVADRVDYVTAKKSG |
| | | | EILSDIKYHKDWNEVKSNYTLTDTPQ |
| | | | LDMAREAARILNQSLYKESWEKEKA |
| | | | TGYLLPPDTVQIRHAKHSNDVQSEL |
| | | | KYKADYVKQRGHYVGVASMRDDP |
| | | | KLVWFEHAGEIQNDRLYKSNYHKTK |
| | | | SKIHIPADIMSVVAAKECQALVSDVD |
| | | | YRHYLHQWTCHPDQNDCIQARKAY |
| | | | DLQSDNIYKSDLEWLRGCGWIPLGS |
| | | | VEHKKVKHAQELINKRAYTKDAIEN |
| | | | FSKYTSVVDTPDIVLAKINSVNQSDL |
| | | | KYKETFNLEKGQYIGSDDTPELNHA |
| | | | RDMSLLYSDKLYKRDWEVCKPIGYT |
| | | | LDAKYIPLVGAKHANYVNSELKYKE |
| | | | IYEKLKGHYLAGKDIGDFPSVVHSLA |
| | | | FQKIRSALAYRKNYEDTKTRVHIPSD |
| | | | MMNHVLAKKCQYILSDLEYRTYLH |
| | | | HWNCSPEEHDVIQARRAQEILSDVV |
| | | | YKDDLNWLKGIGCYVWDTPQILHA |
| | | | KKSYDLQSQIKYTAAGKENFQNFGV |
| | | | VTDTPVYVTAVQSGINASDVKYKED |
| | | | YHKTKDKYTTVTETADSERVQNLKH |
| | | | LFSNNLYKEAWDRVKATSYIMPSDA |
| | | | VSLARAKELKHNASIVKYREEYDKF |
| | | | KALYTLPRSVEDDPNTARCLRVGKL |
| | | | NIDRLYKETYEKNKAKVHIIPDMVDI |
| | | | IAAKDAQKKISEIDYRTHLHDWICLP |
| | | | DLQINAHVRKVADQISDVVYKDDLN |
| | | | WLKGIGCFVWDTPEILHAKHAYDLR |
| | | | SDIKYKSDADKMKSKYTVVMDTPV |
| | | | YVQNILSGLNASEVIYRGDYLKKVR |
| | | | GKMIPTDKTVDLQRAHHANKIQSEN |
| | | | LYRWAGLKALPTGYSLPKDTPGFQH |
| | | | AKHVQHIGSDLKYKEAYEHMKAKG |
| | | | YTLGPNDVGFENVKKVNQVINERLY |
| | | | RATYHKNKDKIHTTPDTPEIRQVRAT |
| | | | QEAVSDLIYKSDFFKLQGHLISLPFTP |
| | | | QVLHCRYVGDITSDNKYKEDLKWL |
| | | | QGLGCFLYDTPDMVRARQLRKLWS |
| | | | NYVYTDSAKKMRDKYSVVLDTPGY |
| | | | RTVQELKTHLSDLVYRAAGKELKTK |
| | | | YTSVLNTPDFLRAKEGQRIQSQYLYV |
| | | | ALATKERPHHHAGNQTPAFTHARHV |
| | | | KDMVSETKYKIQYEKMKDKYTPVL |
| | | | DTPILIRAKRAYLNASDLRYKETFEN |
| | | | TKGKYHTVKDALDIVYHRKVTDDIS |
| | | | SVKYKENYMSQLGIWRSIPDRPEHFH |
| | | | HRAVTDAISDVKYKEDLSWLRGIGC |
| | | | YAWDTPDFALAEKNKVLYSGHKYK |
| | | | ETFEKTKSHFKYVADSPINRHFKHAT |
| | | | QLLDANSYKSLAKMLLKQGCNEILR |
| | | | PDILTALYNSYLWSQVEYKKDYEKK |
| | | | KDKYTTWDTPENIRTAKVNKQISDI |
| | | | IYKLEYNKAKPKGYTTIHDTPMLLH |
| | | | VRKVKDRISDLKYKELYERNKSHCN |
| | | | VVADSVHIKTPRHAYKLNSNLDYKK |
| | | | KYEAAKAHWHWIADRPDFVQAAKS |
| | | | SLQQSDYEYKLDREYLKGCKLSVTD |
| | | | DKNTVLALNNAILASDIKYKEKHNK |
| | | | ARGTCLVVPDTPQILLAKNVSSLVSE |
| | | | NKYKEHSKKQLPRGSYTTLPETRDT |
| | | | AHVKEVTKNVSDTNYKKKFVKEKG |
| | | | KSNYSIMLEPPEVKHAMEVAKKQST |
| | | | VEYKKDAKSKLHYTPIADRPDIKKA |
| | | | TQAAKLISDIEYKKRGEAGLGVTML |
| | | | GRPDIELAKEVSKLTSQVKYKENFSK |
| | | | EKGKKPKYDLKEAKIYKTMKDAHNI |
| | | | ASEVKYKADLKKLHKPVTDMSESLI |
| | | | MNHVLNTSQLASAVKYKEKYEKEK |
| | | | GKPMLDFETPTYLTAKESQLMQSEK |
| | | | EYRKDLEEGVKGKGLSVLEETPDML |
| | | | RAKNATQILNEKEYKKALELEIKGK |
| | | | GLSELALETPDFVRAKNATDIASQIK |
| | | | YKQLAEMEKANYTSVVDTPEIIHAQ |
| | | | QVKNLSSQKKYKEEAEKTMPYYVP |
| | | | VADTPEMQRVRENQKNFSTLQYQW |
| | | | DLQNSKGKVTVVQDTPEMLRVKEN |
| | | | QKNFSSIKYKESIGKGTPIPDLPEVKR |
| | | | VKETQKHISSVLYKEHLAKGTPTPM |
| | | | TPEMERAKRNQENISSVLYSDSFRKQ |
| | | | VQGKAAYVLDTPEMRRVRETQKHIS |
| | | | TVKYHEDFEKNKGTFTPVVTDPITER |
| | | | VKKNMHDFSDISYRGIQRRVVEMEQ |
| | | | KRVDQDQENLTGLRVWRTNPGSVF |
| | | | DYDPAEDNIQSRSLHMISVQAQRRSR |
| | | | EHSRSASALSISGGDEKSEPSEGVNQ |
| | | | HLSYYSSGGFFTTTATVGYKHAKTIE |
| | | | LPQQRSASVATQQTTVSSVPSHPSTA |
| | | | GKTYRAMYDYTAADADEVSFKDGD |
| | | | TIVNVQAIDEGWMYGTVQRTGKTG |
| | | | MLPANYVEAV |
| SEQ ID | XP_025008310.1 | Nebulin isoform | MEEEEYEEVVEYYIEETIVEEGEPYE |
| NO: 92 | (NCBI) | X17/Gallus | VVTEITDSTSTEFTGPTTITRTIEYEKT |
| | | gallus | SGEGAATPVRKKTIRTKMDTSKFLTP |
| | | | YLQHSNKMKDLFSENKYKEKFNKER |
| | | | GKPYASTIDTPEIRRIKKVQEQLSEVK |
| | | | YRMAGEAARTICHVDEKAWDIEHA |
| | | | KKVSQQVSKVLYKQNWEENKDKYL |
| | | | LPPDAPELVNAIKNTAMFSKKLYTED |
| | | | WEGDKTLFYPYNDSPELRRVAQAQK |
| | | | ALSDIVYKKGHDERKSKYTSLPDPPD |
| | | | VEQAKKVTRQLSDIIYHDDYKNKIK |
| | | | GKWSQTPCYDVVIAKMNAENLSMK |
| | | | KYQEDFENVKDQIYFMQTETPEYEA |
| | | | NKRVSDNVSKIKYRADYEKNKAIAD |
| | | | YNVLPATENPLLRQLKTAGDVLSDK |
| | | | LYKEAYERSKGTSMNYCETPKFQTD |
| | | | NALKNFSDVKYKDAYQKNILGHYL |
| | | | GSFEDPHQIHCMKVEAMKSDKNYK |
| | | | ADYEEEKTKCYFPQTITQEYEAIKKL |
| | | | EQCKDHTYKKHPDQIKFTPVTDSPV |
| | | | QKQAEINSKQLSDKLYRSSGEEVKH |
| | | | KYTLPPDVPQFIQARYNAANVSDAY |
| | | | YKQDYHDLIAKGNNVSLDAIPITRAK |
| | | | ASRNIASDYKYKEAYEKAKGQQVGF |
| | | | KSLQDDPKLVHYMHVAKIQSDREYK |
| | | | KDYEKSKTNYHTPPDTFSIQAAKKSQ |
| | | | DVASTAHYKNLIHHYTYLPDAMDVE |
| | | | LAKNMMQIQSDNVYKQDYNSWFKG |
| | | | IGWSPLGSLDVEKAKKAGDALNEKK |
| | | | YRQHPDTIKFTSVPDSMTMVLAQHN |
| | | | TKQLSDVAYKQEGEKVKHKYKLDP |
| | | | DVPQFIQARVNAFNLSDANYKADW |
| | | | KKTIAKGYDLKPDAIPIIAAKASRNIA |
| | | | SDYKYKESYEKDKGRQVGYRSLQD |
| | | | DPKLVHYMHVAKMQSDREYKKDYE |
| | | | VTKTKYHTPLDMFSVTAAKKAQEA |
| | | | VTNTGYKQLIHHYTLLPDSVNLELSR |
| | | | NMMQLQSDNMYKADFNNWLRGVG |
| | | | WLPIQSLEVEKAKKASEILSEKKYRQ |
| | | | HPDKLKYSIPLDAMEQVLAKQNAKT |
| | | | MNKRLYTDKWNKEKTSIHVMPDTP |
| | | | EILQSRVNQITMSNKLYKAGWEEDK |
| | | | KKGYDMRPDAIPIKAAKTSQDIASDY |
| | | | KYKLAHEKAKGKHIGFRSLEDDPKL |
| | | | VHFMQVAKMQSDREYKKDYEKAKT |
| | | | NFHTPVDMLSVVAAKKAQEVATNA |
| | | | NYKNLIHVYNVLPDAMSLELAKNM |
| | | | MQIQSNNQYRAEYDESMKGVGWMP |
| | | | LGSLEAEKNKKAMEILSEKKYRQHP |
| | | | DKLKYSVPVDSMNMALALHNAKIM |
| | | | DEHQYKQAWEEDKKKVHMTPDIPQ |
| | | | FALAKANAFNISDKMYRHSFEEARK |
| | | | KGYDLRSDAIPIKAAKASRDIASDYK |
| | | | YKLGYEQDKGKLVGFRSLQDDPKLV |
| | | | HYMQVAKMQSDREYKKAYETSKTH |
| | | | YQTPSDALSIMAAKEAQDRVTNANY |
| | | | KRLIHHYMLLPDAMSFELYRNMNQI |
| | | | QSNNEYKQDYNEWFKGIGWSPAGSL |
| | | | DVEKSKKATEIASDQKYRQHPSIFPF |
| | | | TKQIDAMDMVLAKHNADIMNKHAY |
| | | | TQAWEKDKTQVHVMPDTPDILQAK |
| | | | QNKANYSQKQYKLDWQEMIKKGYD |
| | | | LTPEAISVKAAKASRDIASDYKYKEG |
| | | | YRKQQGHHIGFRSLQDDPKMMWSM |
| | | | QVAKMQSEREYKKDFEKWKTKFNM |
| | | | PVDMLGFLLAKKCQELVSDIDYKHM |
| | | | LHRWTCLPDQNDVTQAKRVYELQS |
| | | | DNLYKSDLQWLRGIGWSPLGSLESE |
| | | | KNKKASEILSEKKYRQHPDTIKFTSIP |
| | | | DAMNIILAKSNAKNRSDILYREAWD |
| | | | KDKTQVHIMPDTPEILLAKSNLINTS |
| | | | DKHYKLGYEELRRKGYDLPPDAIPL |
| | | | KSAKASRDIASEYQYKTAYRKQLGH |
| | | | HVGARNIEDDPKMMWSMHVAKIQS |
| | | | DREYKKAFEKTKTHFSSPVDMLGIV |
| | | | LAKKCQELVSDVDYKHLLHRWTCL |
| | | | PDQNDVVQARKVYDLQSDNVYKSD |
| | | | LQWLRGIGWSPLGSLDEEKNKRASM |
| | | | ILSDKKYRQHPDTIKFTSLPDSMPMV |
| | | | LAKHNSEIMNHRSYIAAWEKDKTSI |
| | | | HIMPDTPGILLAQQNKVNYSEKMYR |
| | | | LAMEEDKKKGYDLRADAIPIKAAKA |
| | | | SRDIASDYKYKEGYRKQLGHHIGAR |
| | | | NIEDDPKMMWSMHVAKVQSDREYK |
| | | | KAFEKTKTHFSSPVDMLGIVLAKKC |
| | | | QELVSDVDYKHLLHRWTCLPDQND |
| | | | VVQARKVYDLQSDNVYKSDLQWLR |
| | | | GIGWSPLGSLDEEKNKRASMILSDKK |
| | | | YRQHPDTIKFTSLPDSMPMVLAKHN |
| | | | SEIMNHRSYIAAWEKDKTSIHIMPDT |
| | | | PGILLAQQNKVNYSEKMYRLAMEED |
| | | | KKKGYDLRADAIPIKAAKASRDIASD |
| | | | YKYKEGYRKQLGHHIGARNIEDDPK |
| | | | MMWSMHVAKVQSDREYKKAFEKT |
| | | | KTHFSSPVDMLGIVLAKKCQELVSD |
| | | | VDYKHLLHRWTCLPDQNDVVQARK |
| | | | VYDLQSDNVYKSDLQWLRGIGWSPL |
| | | | GSLDEEKNKRASMILSDKKYRQHPD |
| | | | TIKFTSLPDSMPMVLAKHNSEIMNHR |
| | | | SYIAAWEKDKTSIHIMPDTPGILLAQ |
| | | | QNKVNYSEKMYRLAMEEDKKKGY |
| | | | DLRADAIPIKAAKASRDIASDYKYKE |
| | | | GYRKQLGHHIGARNIEDDPKMMWS |
| | | | MHVAKVQSDREYKKAFEKTKTHFSS |
| | | | PVDMLGIVLAKKCQELVSDVDYKHL |
| | | | LHRWTCLPDQNDVVQARKVYDLQS |
| | | | DNVYKSDLQWLRGIGWSPLGSLDEE |
| | | | KNKRASMILSDKKYRQHPDTIKFTSL |
| | | | PDSMPMVLAKHNSEIMNHRSYIAAW |
| | | | EKDKTSIHIMPDTPGILLAQQNKVNY |
| | | | SEKMYRLAMEEDKKKGYDLRADAI |
| | | | PIKAAKASRDIASDYKYKEGYRKQL |
| | | | GHHIGARNIEDDPKMMWSMHVAKI |
| | | | QSDREYKKAFEKTKTHFSSPVDMLGI |
| | | | VLAKKCQELVSDVDYRHYLHQWIC |
| | | | LPDQNDVIHARKAYDLQSDNFYKSD |
| | | | LEWMRGIGWVPIGSLDVEKAKRAG |
| | | | QILSDKVYRQPPDTIKFTSVTDSLEM |
| | | | TLAKHNAETMNKRLYTEAWNKDKT |
| | | | TIHVMPDTPEILLAKQNQAHYSQKM |
| | | | YKLALEESKKKGHDLRFDAIPIQAAK |
| | | | ASREIASDYKYKEGYRKQLGHHIGA |
| | | | RNIEDDPKMMWSMHVAKIQSDREY |
| | | | KKAFEKTKTHFSSPVDMLGIVLAKK |
| | | | CQELVSDVDYRHYLHQWICLPDQND |
| | | | VIHARKAYDLQSDAVYKSDLEWLK |
| | | | GIGWVPIGSLDVEKAKKAGEILSDRK |
| | | | YRQPADQIKFTSVTDSLAMMLAKHN |
| | | | AEIMNKRLYTEAWDADKTSIHVMPD |
| | | | TPTILLAKANAANVSHKHYVQAWE |
| | | | DAKKKGYDMRADAIPIRSAKASRDI |
| | | | ASDYKYKEAHEKQKGHYIGCRTAKE |
| | | | DPKLSWAARAMLLQNDRIYRKAYN |
| | | | DSKAHIHMPVDAMSLQAAKECQTL |
| | | | VSDVDYRHYLHQWTCLPDQNDVMH |
| | | | ARKAYDLQSDNVYKSDLEWLRGIG |
| | | | WLTEGSVDVIKAKKAQEILSDRLYR |
| | | | TQPDKMKFTSITDTPDVVQAKINAM |
| | | | QLSNHLYREVWDKDKTQISIPSDTPE |
| | | | LLQSKLNALNISNKHYQKAWDEAK |
| | | | AKNYDLRADAIPIKHAKASRDIASEY |
| | | | KYKEAHEKQKGHYIGCRTAKEDPKL |
| | | | SWAARAMLLQNDRIYRKAYNDSKA |
| | | | HIHMPVDAMSLQAAKECQTLVSDV |
| | | | DYRHYLHQWTCLPDQNDVMHARK |
| | | | AYDLQSDNVYKSDLEWLRGIGWLTE |
| | | | GSVDVVKAKKAQEILSDRLYRTQPD |
| | | | KMKFTSVTDAPDVVQAKINAMQLS |
| | | | NRLYREAWDKDKTQISIPSDTPEMLQ |
| | | | SKVNALNISNKHYQKAWDEAKAKN |
| | | | YDLRADAIPIKHAKASRDIASEYKYK |
| | | | EAHEKQKGHYIGCRTAKEDPKLSWA |
| | | | ARAMLLQNDRIYRKAYNDSKAHIH |
| | | | MPVDAMSLQAAKECQTLVSDVDYR |
| | | | HYLHQWTCLPDHNDVVHARKAYDL |
| | | | QSDAVYKSDLEWLRGIGWLPNDSPG |
| | | | VQRVKHAQDLLSDKVYRTPIDSVKY |
| | | | TSVVDSPDILLAKMNAEQLSIPKYKE |
| | | | AWEKDKTMIHIMPDTPEITLARSNAH |
| | | | NYSQKLYKEAWDEVKMSYDLRADA |
| | | | IPIKAAKASREIASDYKYKLDHEKQK |
| | | | GHYVGVPNAKADTKIRFALGIGKVQ |
| | | | SELEYKKHFAKWKTQCHLPVDMLSI |
| | | | QSAKHGQSLVSDVDYRHYLHQWICL |
| | | | PDQNDVIHARKAYDLQSDAVYKSDL |
| | | | EWLRGIGWLPNDSLGINHVKHAGDL |
| | | | LNERKYRTKAETLHFTPVADRVDYV |
| | | | TAKKSGEILSDIKYHKDWNEVKSNY |
| | | | TLTDTPQLDMAREAARILNQSLYKES |
| | | | WEKEKATGYLLPPDTVQIRHAKHSN |
| | | | DVQSELKYKADYVKQRGHYVGVAS |
| | | | MRDDPKLVWFEHAGEIQNDRLYKS |
| | | | NYHKTKSKIHIPADIMSVVAAKECQ |
| | | | ALVSDVDYRHYLHQWTCHPDQNDC |
| | | | IQARKAYDLQSDNIYKSDLEWLRGC |
| | | | GWIPLGSVEHKKVKHAQELINKRAY |
| | | | TKDAIENFSKYTSVVDTPDIVLAKINS |
| | | | VNQSDLKYKETFNLEKGQYIGSDDT |
| | | | PELNHARDMSLLYSDKLYKRDWEV |
| | | | CKPIGYTLDAKYIPLVGAKHANYVN |
| | | | SELKYKEIYEKLKGHYLAGKDIGDFP |
| | | | SVVHSLAFQKIRSALAYRKNYEDTK |
| | | | TRVHIPSDMMNHVLAKKCQYILSDL |
| | | | EYRTYLHHWNCSPEEHDVIQARRAQ |
| | | | EILSDVVYKDDLNWLKGIGCYVWDT |
| | | | PQILHAKKSYDLQSQIKYTAAGKENF |
| | | | QNFGVVTDTPVYVTAVQSGINASDV |
| | | | KYKEDYHKTKDKYTTVTETADSERV |
| | | | QNLKHLFSNNLYKEAWDRVKATSYI |
| | | | MPSDAVSLARAKELKHNASIVKYRE |
| | | | EYDKFKALYTLPRSVEDDPNTARCL |
| | | | RVGKLNIDRLYKETYEKNKAKVHIIP |
| | | | DMVDIIAAKDAQKKISEIDYRTHLHD |
| | | | WICLPDLQINAHVRKVADQISDVVY |
| | | | KDDLNWLKGIGCFVWDTPEILHAKH |
| | | | AYDLRSDIKYKSDADKMKSKYTVV |
| | | | MDTPVYVQNILSGLNASEVIYRGDY |
| | | | LKKVRGKMIPTDKTVDLQRAHHAN |
| | | | KIQSENLYRWAGLKALPTGYSLPKD |
| | | | TPGFQHAKHVQHIGSDLKYKEAYEH |
| | | | MKAKGYTLGPNDVGFENVKKVNQV |
| | | | INERLYRATYHKNKDKIHTTPDTPEI |
| | | | RQVRATQEAVSDLIYKSDFFKLQGH |
| | | | LISLPFTPQVLHCRYVGDITSDNKYK |
| | | | EDLKWLQGLGCFLYDTPDMVRARQ |
| | | | LRKLWSNYVYTDSAKKMRDKYSVV |
| | | | LDTPGYRTVQELKTHLSDLVYRAAG |
| | | | KELKTKYTSVLNTPDFLRAKEGQRIQ |
| | | | SQYLYVALATKERPHHHAGNQTPAF |
| | | | THARHVKDMVSETKYKIQYEKMKD |
| | | | KYTPVLDTPILIRAKRAYLNASDLRY |
| | | | KETFENTKGKYHTVKDALDIVYHRK |
| | | | VTDDISSVKYKENYMSQLGIWRSIPD |
| | | | RPEHFHHRAVTDAISDVKYKEDLSW |
| | | | LRGIGCYAWDTPDFALAEKNKVLYS |
| | | | GHKYKETFEKTKSHFKYVADSPINR |
| | | | HFKHATQLLDANSYKSLAKMLLKQ |
| | | | GCNEILRPDILTALYNSYLWSQVEYK |
| | | | KDYEKKKDKYTTVVDTPENIRTAKV |
| | | | NKQISDIIYKLEYNKAKPKGYTTIHD |
| | | | TPMLLHVRKVKDRISDLKYKELYER |
| | | | NKSHCNVVADSVHIKTPRHAYKLNS |
| | | | NLDYKKKYEAAKAHWHWIADRPDF |
| | | | VQAAKSSLQQSDYEYKLDREYLKGC |
| | | | KLSVTDDKNTVLALNNAILASDIKY |
| | | | KEKHNKARGTCLVVPDTPQILLAKN |
| | | | VSSLVSENKYKEHSKKQLPRGSYTTL |
| | | | PETRDTAHVKEVTKNVSDTNYKKKF |
| | | | VKEKGKSNYSIMLEPPEVKHAMEVA |
| | | | KKQSTVEYKKDAKSKLHYTPIADRP |
| | | | DIKKATQAAKLISDIEYKKRGEAGLG |
| | | | VTMLGRPDIELAKEVSKLTSQAEYL |
| | | | KRHMRGHGAASYDTPWMRTFKKA |
| | | | NMLSSHVKYKENFSKEKGKKPKYDL |
| | | | KEAKIYKTMKDAHNIASEVKYKADL |
| | | | KKLHKPVTDMSESLIMNHVLNTSQL |
| | | | ASAYQYKKQYEKSKGHYHMVPDNL |
| | | | EQVHLREASELQSHVKYKEKYEKEK |
| | | | GKPMLDFETPTYLTAKESQLMQSEK |
| | | | EYKRDFEESIKGRNLTGLEITPSLLHV |
| | | | KYATKIASEKEYRKDLEEGVKGKGL |
| | | | SVLEETPDMLRAKNATQILNEKEYK |
| | | | KALELEIKGKGLSELALETPDFVRAK |
| | | | NATDIASQIKYKQLAEMEKANYTSV |
| | | | VDTPEIIHAQQVKNLSSQKKYKEEAE |
| | | | KTMPYYVPVADTPEMQRVRENQKN |
| | | | FSTLQYQWDLQNSKGKVTVVQDTPE |
| | | | MLRVKENQKNFSSILYKEDIGTGTTI |
| | | | EKTPEMQRVKRTQDAISSIKYKESIG |
| | | | KGTPIPDLPEVKRVKETQKHISSVLY |
| | | | KEDLGTGIPTPVTPEIERVKRNQEHIS |
| | | | SVLYKEELGTGTPIPVTPEVERVKRN |
| | | | QEHISSVLYKESVGTGTPTPITPEMER |
| | | | VKRNQEICSSVLYKENIGKATPTPVT |
| | | | PEMERVKRNQEIISSVLYKENVGKVT |
| | | | PTPITPEMERVKRNQEIISSVLYKESL |
| | | | GRATPTPITPEMERVKRNQEQISSVV |
| | | | YKEGLGKATPTPVTPEMERVRRNQE |
| | | | QISSVLYKEHLAKGTPTPMTPEMERA |
| | | | KRNQENISSVLYSDSFRKQVQGKAA |
| | | | YVLDTPEMRRVRETQKHISTVKYHE |
| | | | DFEKNKGTFTPVVTDPITERVKKNM |
| | | | HDFSDISYRGIQRRVVEMEQKRVDQ |
| | | | DQENLTGLRVWRTNPGSVFDYDPAE |
| | | | DNIQSRSLHMISVQAQRRSREHSRSA |
| | | | SALSISGGDEKSEPSEGVNQHLSYYS |
| | | | SGGFFTTTATVGYKHAKTIELPQQRS |
| | | | ASVATQQTTVSSVPSHPSTAGKTYR |
| | | | AMYDYTAADADEVSFKDGDTIVNV |
| | | | QAIDEGWMYGTVQRTGKTGMLPAN |
| | | | YVEAV |
| SEQ ID | F1MQI3 | Nebulin/Bos | MADDEEYEEVVEYYTEETVYEEVPG |
| NO: 93 | (UniProtKB) | taurus | ETRTRFYETTTTRTSDYEQSETSRPA |
| | | | LAQPVPEKPVERKRVIRKKVDPSKF |
| | | | MTPYIAHSQKMQNLFSTNKYKENYE |
| | | | KAKGKPYAITTDTPELRRIKKVQDQL |
| | | | SEVKYRVDGDVAKTICHVDEKAKDI |
| | | | EHAKKVSQQVSKVLYKQNWEDTKD |
| | | | KYLLPPDAPELVQAIKNTAMFSKKL |
| | | | YTEDWEADKTMFYPYNDSPELRRV |
| | | | AQAQKALSDIAYKKGLAEQQTQFTS |
| | | | LPDPPDIEFAKKVTNQVSKQKYKED |
| | | | YENKVKGKWSETPCFEIATARMNSN |
| | | | NISTKKYQEDFEHMKDQIYFMQTET |
| | | | PEYKVNKQAGVAASKVKYKQDYEK |
| | | | NKGKADYNVLPASENPLLRQLKAAG |
| | | | DALSDKLYKENYEKTKAKSINYCET |
| | | | PKFKLDTVLHNFSSDTKYKDSYLKDI |
| | | | LGHYVGSYEDPYHTHCMRVSAQNS |
| | | | DKNYKAEYEEDRGKGFFPQTITQEY |
| | | | EAIKKLDQCKDHTYKVHPDKTKFTQ |
| | | | VTDSPVLMQAQVNSKQLSDLNYKA |
| | | | KHENEKFKCHIPPDTPAFIQHKLNAY |
| | | | NLSDNIYKHDWEKTKAKKFDIKVDA |
| | | | IPLLAAKANTKIASDVMYKKDYEKS |
| | | | KGKMIGALSINDDPKMLHSLKTAKN |
| | | | QSDRLYKENYEKTKAKSMNYCETPK |
| | | | YQLDTLLKNFSEAKYKDSYVQNVLG |
| | | | HYIGSFEDPYQVHCLKISAQNSDKNY |
| | | | KAEYEEDKGKCYFPQTITQEYEAIKK |
| | | | LDQCKDHTYKVHPDKTKFTAVTDTP |
| | | | VLLQAQLNTKQLSDLNYKAKHEGE |
| | | | KFKCHIPADAPQFIQHRVNAYNLSDN |
| | | | IYKHDWEKTKAKKFDIKVDAIPLLA |
| | | | AKANTKIASDVMYKKDYEKSKGKM |
| | | | IGALSINDDPKMLHSLKTAKNQSDHE |
| | | | YRKDYEKSKTIYTAPLDMLPLTHAK |
| | | | KSQAIASDVDYKHLLHNYSYPPDSV |
| | | | NVDLAKKAYALQSDVEYKADYNSW |
| | | | MKGCGWMPFGSLEMEKAKRASDIL |
| | | | NEKKYRQHPDTLKFTSIEDAPIIVQSK |
| | | | INQAQRSDVAYKAKGEEVIHKYSLP |
| | | | ADLPQFIQAKVNAYNISENLYKADL |
| | | | KDLSKKGYDLRIDAIPIKAAKAARQA |
| | | | ASDVQYKKDYEKAKGKMVGFQSLQ |
| | | | DDPKLVHYMNVAKIQSDREYKKAY |
| | | | EKTKTRHNTPHDMVNIVAAKKAQD |
| | | | VASNVNYKHSLHHYTYLPDAMDLE |
| | | | LSKNMMHIQSDNVYKEDYNNWMK |
| | | | GIGWIPIGSLEVEKVKKAGDALNEKK |
| | | | YRQHPDTLKFTSIVDSPVMVQAKQN |
| | | | TQQVSDILYKAKGEDVKHKYTMSPD |
| | | | LPQFLQAKCNAYNLSDVCYKRDWH |
| | | | DLIAKGTNVLGDAIPITAAKASRNIAS |
| | | | DYKYKEAYEKAKGKQVGFRSLQDD |
| | | | PKLVHYMNVAKLQSDREYKKNYEN |
| | | | TKTSYHTPGDMVSITAAKMAQDVAT |
| | | | NVNYKQPIHHYTYLPDALSLEHIRNV |
| | | | NQIQSDNVYKDEYNHFFKGMGWIPI |
| | | | GSLEVEKVKKAGDALNEKKYRQHP |
| | | | DTIKFTSVPDSMGMVLAQHNTKQLS |
| | | | DLNYKVEGEKVKHKYTMDPDVPQFI |
| | | | QAKVNAYNMSDSHYKADWKKTLA |
| | | | KGYDLRPDAIPIVAAKSSRNIASDFK |
| | | | YKEAYEKTKGKQIGFRSLQDDPKLV |
| | | | HFMNVAKMQSDREYKKGYEASKTK |
| | | | YHTPLDMLSVTAAKKSQEVATNTNY |
| | | | KQPFHHYTLLPDALNVEHSRNAMQI |
| | | | QSDNLYKSDFTNWMKGIGWLPLESL |
| | | | EVEKAKKAGEILSEKKYRQHPEKLK |
| | | | FTYAMDTMEQALNKSNKLIMDKRL |
| | | | YTEKWNKDKTTIHVMPDTPDILLSR |
| | | | VNQITMSDKLYKAGWEEEKKKGYD |
| | | | LRPDAISIKAARASRDIASDYKYKQA |
| | | | YEQAKGKQIGFRSLEDDPKLVHFMQ |
| | | | VAKMQSDREYKKAYEKSKTSFQTPV |
| | | | DMLSVVAAKKSQEVATNANYRNVI |
| | | | HTYNMLPDAMSLELAKNMMQIQSD |
| | | | NQYKADYADFMKGIGWLPLGSLEA |
| | | | EKNKKAMEIISEKKYRQHPDTLKYST |
| | | | LMDSMNMVLAKNNAKIMNEHLYK |
| | | | QAWEADKTKVHIMPDIPQIILAKANA |
| | | | INISDKLYKLSLEEAKKKGYDLRTDA |
| | | | IPIKAAKASRDIASDYKYKHSYEKER |
| | | | GKMVGFRSLEDDPKLVHSMQVAKM |
| | | | QSDREYKKNYEKTKTSYHTPADMLS |
| | | | VTAAKDAQANITNTNYKHLIHKYILL |
| | | | PDAMNIQLSKNMNRIQSDNEYKQDY |
| | | | NEWYKGLGWSPAGSLEVEKAKKAT |
| | | | EYASDQKYRQHPSNFQFTKLNDSMD |
| | | | MVLAKQNAHTMNKYLYTVDWNKD |
| | | | KTKIHVMPDTPDILQAKQNQTMYSQ |
| | | | VKYKMGWPSGLERVVNLPSVLIKIF |
| | | | KSKQNKDLIWRFKYKQGYRKQIGHH |
| | | | IGFRSLQDDPKLVLSMNVAKMQSER |
| | | | EYKKDFEKWKTKFSSPVDMLGVVL |
| | | | AKKCQALVSDVDYKNYLHGWTCLP |
| | | | DQNDVIHAKKAYDLQSENLYKSDLE |
| | | | WLKGIGWSPLGSLEAEKNKRASEIIS |
| | | | EKKYRQPPDRNKFTSIPDAMDIVLAK |
| | | | TNAKNRSDILYREAWDKDKTQIHIM |
| | | | PDTPDIILAKANLINTSDKFYRMGYE |
| | | | ELRKKGYDLPVDAIPIKAAKASREIA |
| | | | SEYKYKEGFRMQLGHHIGARNIKDD |
| | | | PKMMWSMHVAKIQSDREYKKDFEK |
| | | | WKTKFSSPVDMLGVVLAKKCQTLV |
| | | | SDIDYKNYLHQWTCLPDQSDVIHAR |
| | | | RAYDLQSDNLYKSDLQWLRGIGWLP |
| | | | SGSLEDEKNKRASQILSDHVYRQHP |
| | | | DQFKFSSLMDSIPMVLAKNNAITMN |
| | | | HRLYTEAWDKDKTTVHIMPDTPEVL |
| | | | LAKQNQINYSEKLYKLGLDEAKRKG |
| | | | YDMRIDAIPIRAAKASRDIASEFKYK |
| | | | EGYRRQLGHHIGARAIHDDPKMMW |
| | | | SMHVAKIQSDREYKKDFEKWKTKFS |
| | | | SPVDMLGVVLAKKCQTLVSDIDYKN |
| | | | YLHQWTCLPDQSDVIHARQAYDLQS |
| | | | DNVYKSDLQWLRGIGWVPIGSLDVE |
| | | | KSKRASEILSDKLYRQPPDKFKFTSV |
| | | | TDSLEQVLAKNNAINMNKRLYTEA |
| | | | WDKDKTQVHIMPDTPEITLARTNKV |
| | | | NYSENLYKLAHEEAKKKGYDLRSD |
| | | | AIPIIAAGLEKDHISDYKYKDGYRKQ |
| | | | LGHHIGARDIKDDPKMMWSMHVAK |
| | | | IQSDREYKKDFEKWKTKFSSPVDML |
| | | | GVVLAKKCQTLVSDIDYKNYLHQW |
| | | | TCLPDQSDVIHARQAYDLQSDNVYK |
| | | | SDLQWLRGIGWVPIGSVDVVKCKRA |
| | | | AEILSDNLYRQPPDTLKFTSVPDSLE |
| | | | QVLAKNNAINMNKRLYTEAWDKDK |
| | | | TQIHIMPDTPEIMLARQNKLNYSETL |
| | | | YKLANEEAKKKGYDLRSDAIPIVAA |
| | | | KASRDIISDYKYKDGYRKQLGHHIG |
| | | | ARDIKDDPKMMWSMHVAKIQSDRE |
| | | | YKKDFEKWKTKFSSPVDMLGVVLA |
| | | | KKCQTLVSDIDYKNYLHQWTCLPDQ |
| | | | SDVIHARRAYDLQSDNIYKSDLQWL |
| | | | RGIGWVPIGSVDVVKCKRAAEILSDN |
| | | | LYRQRPDTLKFTSVPDSLEQVLAKN |
| | | | NAINMNKRLYTEAWDKDKTQIHMM |
| | | | PDTPEITLARQNKINYSENLYRQAME |
| | | | EAKKEGYDLRSDAIPIVAAKASREIA |
| | | | SDYKYKEAYRKQLGHHIGARAIHDD |
| | | | PKMMWSVHVAKMQSDREYKKDFE |
| | | | KYKTRFSSPVDMLGIVLAKKCQTLV |
| | | | SDVDYKHPLHEWTCLPDQNDIIHAR |
| | | | KAYDLQSDNLYKSDLEWLKGIGWV |
| | | | PIGSVEVLKAKRAGEILSDNIYRQRP |
| | | | DTLKFTSVTDSPEQVLAKNNAINMN |
| | | | KRLYTEAWDNDKKTIHVMPDTPEIM |
| | | | LAKLNRINYSDKLYKLALEESRKEG |
| | | | YDLRLDAIPIQAAKASREIASDYKYK |
| | | | EGYRKQLGHHIGARNIKDDPKMMW |
| | | | SIHAGKLQSDLEYKKDFEKWKTKFS |
| | | | SPVDMMGLVQAKKCQILVSDIDYKN |
| | | | LLHEWTCLPDQNDIIQARKAYDLQS |
| | | | DAIYKADLEWLRGIGWVPIDSVGVE |
| | | | HAKRAGEILSERKYRQPAVQLKFTSI |
| | | | TDTPEIVLAKNNALNVSKHLYTEAW |
| | | | DADKTSIHVMPDTPEILLAKSNSANIS |
| | | | HKLYTKGWDESKMKDYDLRADAISI |
| | | | KSAKASRDIASDYKYKEAYEKHKGH |
| | | | HIGARSVEDDPRIMCAMNAGRIQSER |
| | | | EYKKEFQKWKTKFSSPVDMLGILLA |
| | | | KKCQTLVSDIDYRNYLHHWTCLPDQ |
| | | | NDIIQARKAYDLQSDAIYKADLEWL |
| | | | RGIGWMPEGSPEVLRVKNAQHIFRD |
| | | | SVYRTPVVKLKYTSIVDTPEVVLAKS |
| | | | NAENISIPKYREVWDKDKTSIHIMPD |
| | | | TPEINLARTNALNVSNKLYREGWDE |
| | | | MKMSCDVRLDAIPIQAAKASREIASD |
| | | | YKYKLDHEKQKGHYVGTRTARDDN |
| | | | KIRWALIAGKIQNEREYRLHWAKWK |
| | | | SKFQSPPDMLSIEHSKNSQTLVSDIDY |
| | | | RHYLHQWTCMPDQNDVIQARKAYD |
| | | | LQSDAIYKADLEWLRGIGWMPADSV |
| | | | SVNHAKHMADIFNEKKYRTKIETLSF |
| | | | TPVDDRVDYVTAKHSGEILNDIKYR |
| | | | KDWNDTKSKYTLTETPQLHTAQEAA |
| | | | RILDQYLYKESWEKQKATGYILPPD |
| | | | AVPFVHAHHSGDVQSELKYKAEHV |
| | | | KQKGHYVGVPTMRDDPKLVWFEHA |
| | | | GQIQNDRLYKENYHKTKAKIHIPPD |
| | | | MVSVLAAKEGQALASDIDYRNYLH |
| | | | QWICHPDQNDVIQARKAYDLQSDNI |
| | | | YKADLEWLRGIGWIPLDSVDHVRVT |
| | | | RNQEMMNQIKYKKDALANYPNFTS |
| | | | VVDPPEIVLAKINSVNQSDVKYKETF |
| | | | NKLIKGKYIFSPDTPYITHSKDMEKL |
| | | | YSTILYKRAWDGTKAYGYTLDERYI |
| | | | PIVGAKHADFVNSELKYKETYEKLK |
| | | | GHYLAGKEISEFPNVVHCLDFQKMR |
| | | | SLLNYRRHYEDTKANVHIPQDMMN |
| | | | HVLAKRCQYILSDLEYRHYFHQWTS |
| | | | LPEEPNVVRVRHAQEILSDNVYKDD |
| | | | LNWLKGIGCYVWDTPQILHAKKSYD |
| | | | LQSQILYTAAGKENLKNYNLVTDTP |
| | | | LYVTALQSGINASEVKYKENYHQTK |
| | | | DKYTTVLETVDYDRIKNLKDLFSSNL |
| | | | YKEAWDKVKATSYILPPNTVSLTHA |
| | | | KNQKYMASHIKYREEYEKFKALYTL |
| | | | PRSVEDDPNTARCLRVGKFNIDRLYR |
| | | | SVYEKNKMKIHIVPDMVEMVTAKDS |
| | | | QKKVSEIDYRLHLHEWICHPDLQVN |
| | | | SHVRKVTDQISDIVYKDDLTWLKGI |
| | | | GCYVWDTPEILHAKHAYDLRNDIKY |
| | | | KAHVLKTRNNYKLVTDTPVYVQAV |
| | | | KSGKQLSDAVYHYDYVHSIRGRVAP |
| | | | TTKTVDLDRALHAYKLQSENLYRKA |
| | | | GLHALPTGYRLPVDTPHFKHTKDTR |
| | | | YMSSYFKYKEVYEHMKAYGYTLGP |
| | | | NDVPFVNVRRVNNITSERLYRQLYH |
| | | | KLKDKIHTTPDTPEIRQVKKTQEAVS |
| | | | ELIYKSDFFKMQGHMISLPYTPQVLH |
| | | | CRYVGDITSDIKYKEDLQVLRGMGC |
| | | | FLYDTPDMVRSRHLRKLWSHYLYTD |
| | | | KARKMRDKYKVVLDTPEYRKVQEL |
| | | | KTHLSELVYRAAGRKQKSIFTSVPDT |
| | | | PDLTRAKRGQKLQSQYLYVELATKE |
| | | | RPHHHAGNQTTALKHARHVKDMVS |
| | | | ENKYKIQYEKMKDKYTPVPDTPILIR |
| | | | AKRAYWNASDLRYKETFQKTKGKY |
| | | | HTVKDALDIVYHRTVTDHISKIKYKE |
| | | | NYMSQLGIWRSIPDRPEHFHHRAVT |
| | | | DAVSDVKYKQDLTWLKGIGCYAYD |
| | | | TPDFTLAEKNKTLYSKYKYKEVFER |
| | | | TKSNFKYVADCPINRHFKFATQLMN |
| | | | EKKYRADYEQRKDKYHLVVDEPRH |
| | | | LLAKIAGDQISQIKYRKNYEETKDKF |
| | | | TSIVDTPEHLRTTKVNKQISDILYKLE |
| | | | YNKAKPRGYTTIHDTPMLLHVRKVK |
| | | | DEVSDLKYKEVYQRTKSNCTIEPDA |
| | | | VHIKAAKDAYKVNTNLDYKKKYEA |
| | | | TKAYWKWTPDRPDFIQAAKSTLQQS |
| | | | DFEYKLDREYLKGCKLSVTDDKDM |
| | | | VLALKNSIIESDLKYKEKHVKERGSC |
| | | | HAVPDTPQILLAKTVSSLVSENKYKS |
| | | | YVKKHLAQGSYTTLPETRDTIHVKE |
| | | | VTKNVSDTNYKKKFVKEKGKSNYSI |
| | | | MLEPPDVKHAMDVAKKQSNVAYKK |
| | | | DAKENLHYTTVADRPDIKKATQAAK |
| | | | QASEVEYRAKHRKEGSHGLSMLGRP |
| | | | DIEMAKKAAKLSSQVQYRENFNKEK |
| | | | GKTPKYNPKDSQLYKVMKDANTLA |
| | | | SEVKYKADLKKLHKPVTDMKESLIM |
| | | | NHVLNTSHLASSYQYKKNYEKSKGH |
| | | | YHTIPDNLEQLHLKEATELQSIVKYK |
| | | | EKYEKERGKPMLDFETPTYITAKESQ |
| | | | QMQSGKEYRKDYEESIKGRNLTGLE |
| | | | VTPALLHVKYATKIASEKEYRKDLE |
| | | | ESIRGKGLSEMEDTPDMLRAKNATQI |
| | | | LNEKEYKRDLELEVKGRGLNAMAN |
| | | | ETPDFLRARNATDIASQIKYKQSAEM |
| | | | EKANFTSVVDTPEIIHAQQVKNLSSQ |
| | | | KKYKEDAEKCMSYYETVLDTPEMQ |
| | | | RVRENQKNFSLLQYQYDLKNSKGKI |
| | | | TVVQDTPEILRVKENQKNFSSVLYKE |
| | | | DVSPGTAIGKTPEMMRVKQTQDHIS |
| | | | SVKYKEVIGQGTPIPDLPEVKRVKQT |
| | | | QKHISSVMYKENLGTGIPTPVTPEIER |
| | | | VKRNQENFSSVLYKENLGKGTPTPIT |
| | | | PEMERVKRNQENFSSILYKENLSKGT |
| | | | PLPVTPEMERVKRNQENFSSVLYKE |
| | | | NVGKGTPTPVTPEMQRVKRNQENIS |
| | | | SVLYKENLGKATPTPFTPEMERVKR |
| | | | NQENFSSVLYKENMRKATPTPVTPE |
| | | | MERAKRNQENISSVLYSDSFRKQIQG |
| | | | KAAYVLDTPEMRRVRETQRHISTVK |
| | | | YHEDFEKHKGCFTPVVTDPITERVKK |
| | | | NTQDFSDICYRGIQRKVVEMEQKRN |
| | | | DQDQETITGLRVWRTNPGSVFDYDP |
| | | | AEDNIQSRSLHMINAQAQRRSREQSR |
| | | | SASGLSISGGEEKSEHSEAAHLSTYS |
| | | | DGGVFFSAASTGYKHARTTELPQQR |
| | | | SSSVATQQTTVSSIPSHPSTAGKIFRA |
| | | | MYDYMAADADEVSFKDGDAIVNVQ |
| | | | AIDEGWMYGTVQRTGRTGM |
| | | | LPANYVEAI |
| SEQ ID | F1MPU4 | Myotilin/Bos | MFNYERPKHFIQSQNPCGSRLQPPGP |
| NO: 94 | (UniProtKB) | taurus | EISSYSSQTKQSSITIQPRQCTEQRYS |
| | | | ASSTVSSHITMSSSAFPASPQQLAGSN |
| | | | PAQRVTATYNQSPASFLSSILPSQPDY |
| | | | SSSKNPSTVDSNYQQPSVGQPINVKS |
| | | | SQNANAKLTPKTPDHEIQGSKEALIQ |
| | | | DLERKLKCKDSLLHNGNQRLTYEEK |
| | | | MARRLLGPQNAAAVFQGQNDSEAQ |
| | | | DSAQQHNIEHARLQVPTSQVRSRSSS |
| | | | RGDVNDQDAIQEKFYPPRFIQVPEN |
| | | | MSIEEGRFCRMDFKVSGLPAPDVSW |
| | | | YLNGRPVQSDDFHKMIVSEKGFHSLI |
| | | | FEVVRASDAGAYACVAKNRAGEAT |
| | | | FTVQLDVLAKEHRRAPMFIYKPQSK |
| | | | KVFEGESVKLECQISAVPPPKLFWKR |
| | | | NNEMVQFNTDRISLYHDNSGRVTLLI |
| | | | KDVNKKDAGWYTVSAVNEAGVTTC |
| | | | NTRLDVTARPNQTLPAPKQLRVRPTF |
| | | | SKYLALNGKGLNVKQAFNPEGEFQR |
| | | | LAAQSGLYESEEL |
| SEQ ID | A0A1D5NT92 | Myotilin | MSVRNLPSVSSMCQPTMFNYERPKH |
| NO: 95 | (UniProtKB) | OS = Gallus | FIQSKNVCQGQQQPPGSSTSTESSRQI |
| | | gallus | KQSSILIQPRNPSGQKFSSSSSLSSSITL |
| | | | SSPSCSAPKESTYPVTPASAQSPASSS |
| | | | SGQRLISMPNQTPAAFLCSVLPSQPD |
| | | | YNSQTPPMEPHYSKPMYKKQASINS |
| | | | MQKTSDQEIRGTKEALIQDLEKKLRC |
| | | | KDNLLQNGNQRLTYEERMARRLLGP |
| | | | ENAASVLEAQSEDMQNTQNAENVR |
| | | | LQVPTTHVRSRPSSRGDERGHDSIQE |
| | | | KFFQPRFTQVPEDVIIEEGRFCRLDFK |
| | | | VSGLPTPDVMWYQNGRMVHQDQFH |
| | | | KMIVSEKGFHSFIFEAVKSSDAGTYE |
| | | | CVAVNRAGESSFAVKVEVIAKEHHT |
| | | | PPTFIFKPQSKKVFEGDTARLECQISA |
| | | | IPTPRIYWKRNNEMVQYNTDRISLLH |
| | | | DNTGRICLLIHNANKKDAGWYTVSA |
| | | | VNGAGVATCHARLEVATHTNKPVP |
| | | | APKQLRVRPTFSKYLALNGRGLDVK |
| | | | QAFSPEGEFQRLAEQSGLYESDEL |
| SEQ ID | F1RH92 | Myotilin/Sus | MFNYERPKHFIQSQNPCGSRLQPPGP |
| NO: 96 | (UniProtKB) | scrofa | ETSSYSSQTKQSSIIIQPRQCTEQRFSA |
| | | | SSTVSSHITMSSSAFPASPQQPAASNP |
| | | | GQRVTATYNQSPASFLSSILPSQPDYS |
| | | | SSKIPSTMDSNYQQPSVGQPVNAKPS |
| | | | QSLNAKPIPRTPDHEIQGSKEALIQDL |
| | | | ERKLKCKDSLLHNGNQRLTYEEKM |
| | | | ARRLLGPQNAAAVFQAQNDSAAQD |
| | | | SPQQHNSEHARLQVPTSQVRSRSSSR |
| | | | GDVNDQDAIQEKFYPPRFIQVPENMS |
| | | | VEEGRFCRMDFKVSGLPAPDVSWYL |
| | | | NGRPVQSDDLHKMIVSEKGFHSLIFE |
| | | | VVRASDAGAYACVAKNRAGEATFT |
| | | | VQLDVLAKEHRRAPMFIYKPQSKKV |
| | | | FEGDSVKLECQISAIPPPKLFWKRNN |
| | | | EMVQFNTDRISLYHDNSGRVTLLIKD |
| | | | VNKKDAGWYTVSAVNEAGVITCNT |
| | | | RLDVTARPNQTLPAPKQLRVRPTFSK |
| | | | YLALNGRGLDVKQAFNPEGEFQRLA |
| | | | AQSGLYESEEL |
| SEQ ID | XP_013837221.1 | Twinfilin-2/Sus | MAHQTGIHATEELKEFFAKARAGSV |
| NO: 97 | (NCBI) | scrofa | RLIKVVIEDEQLVLGASRELMGCWD |
| | | | QDYDRAVLPLLDAQQPCYLLYRLDT |
| | | | QNAQGFEWLFLAWSPDNSPVRLKM |
| | | | LYAATRATVKKEFGGGHIKDELFGT |
| | | | VKDDLSFAGYQKHLSSCAAPAPLTS |
| | | | AERELQQIRINEVKTEISVESKHQTLQ |
| | | | GLAFPLQPQAQRALQQLRQKMINYI |
| | | | QLKLDLERETIELVHTEPTDVAQLPS |
| | | | RVPRDAARYHFFLYKHTHEGDPLES |
| | | | VVFIYSMPGYKCSIKERMLYSSCKSR |
| | | | LLDSVEQDFQLEIAKKIEIGDGAELT |
| | | | AEFLYDEVHPKQHAFKQAFAKPKGP |
| | | | GGKRGHKRLIRGPGENGDDS |
| SEQ ID | XP_024844129.1 | Dystrophin | MLWWEEVEDCYEREDVQKKTFTK |
| NO: 98 | (NCBI) | isoform X4/Bos | WINAQFSKFGKQHIENLFSDLQDGRR |
| | | taurus | LLDLLEGLTGQKLPKEKGSTRVHAL |
| | | | NNVNKALQVLQKNNVDLVNIGSSDI |
| | | | VDGNHKLTLGLIWNIILHWQVKNVM |
| | | | KNIMAGLQQTNSEKILLSWVRQSTR |
| | | | NYPQVNVINFTTSWSDGLALNALIHS |
| | | | HRPDLFDWNSVVRQQSATQRLEHAF |
| | | | NIAKYQLGIEKLLDPEDVATTYPDKK |
| | | | SILMYVTSLFQVLPQQVSLEAIQEVE |
| | | | MLPRPSKVTREEHFQLHHQMHYSQQ |
| | | | ITVSLAQGYERTPSSPQPRFKSYAYT |
| | | | QAAYVSTSDPTRSPFPSQRLEAPEDK |
| | | | SFGSPLMETEVNLDSYQTALEEVLS |
| | | | WLLSAEDTLQAQGEISNDVEEVKEQ |
| | | | FHTHEGYMMDLTSHQGRVGNVLQL |
| | | | GSQLIGSGKLSEDEETEVQEQMNLLN |
| | | | SRWECLRVASMEKQSNLHKVLMDL |
| | | | QNQQLKELNAWLTKTEERTRKMEK |
| | | | EPLGPDLEDLKRQIQQHKVLQEDLE |
| | | | QEQVRVNSLTHMVVVVDESSGDHA |
| | | | TAALEEQLKVLGDRWANICRWTED |
| | | | RWVLLQDVLLKWQRFTEEQCLFST |
| | | | WLSDKEDALNKIPTSGFKDQSEMLSS |
| | | | LQKLAVLKTDLEKKKQTMDKLCSL |
| | | | NHDLLSTLKNTLVAQKMEAWLDNF |
| | | | AQRWDNLVQKLEKSSTQISQAVTTT |
| | | | QPSLTQTTVMETVTMVTTREQILVK |
| | | | HAQEELPPPPPQKKRQIIVDSEIKKRL |
| | | | DVDITELHSWITRSEAVLQSPEFAVY |
| | | | RKEGNFSDLKEKVNAIEREKAEKFR |
| | | | KLQDASRSAQALVEQMVNEGVNAD |
| | | | SIKQASEQLNSRWIEFCQLLSERLNW |
| | | | LEYQNNIITFYNQLQQLEQMTTTAEN |
| | | | WLKTQPTTPSEPTAVKSQLKNCKDE |
| | | | VNRLSALQPQIERLKIQSIALKEKGQ |
| | | | GPMFLDADFVAFTNHFNQVFADMQ |
| | | | AREKELQTILDTLPTVRYQETMSTIL |
| | | | TWIQQSETKLSIPQVTVTEYEIMEQR |
| | | | LEELQALQSSLQEHQNDLNYLSTTV |
| | | | KEMSRKAPSHISQRYQSEFENIEGRW |
| | | | KKLSAQLNERCQKLEEQMAKLRKL |
| | | | QNHIKTLKKWMAEVDVFLKDEWPA |
| | | | LGDSEILKKQLKQCRLLVSDIQTIQPS |
| | | | LNSVNEGGQKIKTEAEPEFASRLETE |
| | | | LRELNTQWDYICRQVYARKEALKG |
| | | | GLDKTVSLQKDLSEMHEWMTQAEE |
| | | | EYLERDFEYKTPDELQTAVEEMKRA |
| | | | KEEAQQKEAKVQLLTESVNSVIAQA |
| | | | PPAAQEALRKELDTLTTNYQWLCTR |
| | | | LNGKCKTLEEVWACWHELLSYLEK |
| | | | ANKWLNEVELKLKTTENIPGGAEEIS |
| | | | EVLSSLENLMQHSEDNPNQIRILAQT |
| | | | LTDGGVMDELINEELETFNSRWREL |
| | | | HEEAVRRQKLLEQSIQSAQEIEKSLQ |
| | | | LIQESLSSIDKQLAAYIADKVDAAQM |
| | | | PQEAQKIQSDLTSHEISLEEMKKHYQ |
| | | | GKETAQRVLSQIEVAQKKMQDVSM |
| | | | KFRLFQKPANFEQRLQESKMILDEVK |
| | | | MHLPALETKSVEQEVVQSQLNHCVN |
| | | | LYKSLSEVKSEVEMVIKTGRQIVQKK |
| | | | QTENPKELDERVTALKLHYNELGAK |
| | | | VTERKQQLEKCLKLSRKMRKEMNA |
| | | | LTEWLAATDLELTKRSAVEGMPSNL |
| | | | DSEVAWGKATQKETEKQKVHLKSIT |
| | | | ELGEALKTVLGKKETLVEDKLSLLN |
| | | | SNWIAVTSRAEEWLNLLLEYQKHME |
| | | | TFDQNVDHITKWIIQADALLDESEKK |
| | | | KPQQKEDMLKRLKAELNDIRPKVDS |
| | | | TRDQAANLMANRGDHCRKVIEPKIS |
| | | | ELNHRFAAISHRIKTGKASIPLKELEQ |
| | | | FNSDIQKLLEPLEAEIQQGVNLKEED |
| | | | FNKDMSEDNEGTVKELLQRGDNLQ |
| | | | QRITDERKREEIKIKQQLLQTKHNAL |
| | | | KDLRSQRRKKALEISHQWYQYKRQ |
| | | | ADDLLKCLDDIEKKLASLPEPRDERK |
| | | | IKEIDRELQKKKEELNAVHRQAEGLS |
| | | | EDGAAMAVESTQIQLSKRWREIESKF |
| | | | AQFRRLNFAQIHTVHEESVMVMTED |
| | | | MPLEISYVPSTYLTEITHVLQALSEVE |
| | | | QLLNAPDLCAKDFQDLFKQEESLKNI |
| | | | KDNLQQISGRIDVIHNKKAAALQSTT |
| | | | PPEKARLQEALSRLDFQWERVNKMY |
| | | | KDRQGQFDRSVEKWRRFHYDMKIF |
| | | | NQWLTEAEHFLKKTQIPENWEHAKY |
| | | | KWYLKELQDGIGQRQTVVRVLNAT |
| | | | GEEIIQQSSKIDASILQEKLGSLNLRW |
| | | | QEVCKQLAERKKRLEEQKNILSEFQR |
| | | | DLNEFVLWLEEAGNISSIPLEPGNEQ |
| | | | QLKEKLEEVKLLAEELPLRQGILKQL |
| | | | NETGGTVLVSAPISPEEQDKLENKLK |
| | | | QTNLQWIKVSRSLPEKQGEIEAHIKD |
| | | | LGQLEEQLNHLLLWLSPIRSQLEIYN |
| | | | QPNQTGPFDIKETEVAVQAKQPDVE |
| | | | GILSKGQNLYKEKPATEPVKRKLEDL |
| | | | SSEWKAVTHLLQELRAKWPGPVPGL |
| | | | TATGAPPSQTVALVTQPVVAKETAV |
| | | | SKLEMPSSLLLEVPALADFNRAWTE |
| | | | LTDWLSLLDRVLKAQRVMVGDLEDI |
| | | | NEMIIKQKATLQDLEQRRPQLEELIT |
| | | | AAQNLKNKTSNQEARTIITDRIERIQS |
| | | | QWDEVQEHLQNRRQQLNEMLKDST |
| | | | QWLEAKEEAEQVVGQARAKLETWK |
| | | | EGPYTMDAIQRKITETKQLAKDLRQ |
| | | | WQINVDVANDLALKLLRDYSADDT |
| | | | RKVHMITENINASWASIHKRVSERET |
| | | | ALEETHRLLQQFPLDLEKFLAWLTE |
| | | | AETTANVLQDATHKERLLEDSKGVR |
| | | | ELMKQWQDLQGEIEAHTDIYHNLDE |
| | | | NGQKILRSLEGSDDAVLLQRRLDNM |
| | | | NFKWSELRKKSLNIRSHLEASSDQW |
| | | | KRLHLSLQELLVWLQLKDDELSRQA |
| | | | PIGGDFPAVQKQNDIHRAFKRELKTK |
| | | | EPVIMSTLETVRIFLTEQPLEGLEKLY |
| | | | QEPRELPPEEKAQNVTRLLRKQAEE |
| | | | VNTEWEKLNLHSADWQRKIDEALER |
| | | | LQELQEATDELDLKLRQAEVIKGSW |
| | | | QPVGDLLIDSLQDHLEKVKALRGEIA |
| | | | PLKENVSHVSDLARQLTTLGIQLSPY |
| | | | NLSTLEDLNTRWKLLQVAVEDRIRQ |
| | | | LHEAHRDFGPASQHFLSTSVQGPWE |
| | | | RAISPNKVPYYINHETQTTCWDHPK |
| | | | MTELYQSLADLNNVRFSAYRTAMK |
| | | | LRRLQKALCLDLLSLSAACDALDQH |
| | | | NLKQNDQPMDILQIINCLTTIYDRLE |
| | | | QEHNNLVNVPLCVDMCLNWLLNVY |
| | | | DTGRTGRIRVLSFKTGIISLCKAHLED |
| | | | KYRYLFKQVASSTGFCDQRRLGLLL |
| | | | HDSIQIPRQLGEVASFGGSNIEPSVRS |
| | | | CFQFANNKPEIEAALFLDWMRLEPQ |
| | | | SMVWLPVLHRVAAAETAKHQAKCN |
| | | | ICKECPIIGFRYRSLKHFNYDICQSCFF |
| | | | SGRVAKGHKMHYPMVEYCTPTTSG |
| | | | EDVRDFAKVLKNKFRTKRYFAKHPR |
| | | | MGYLPVQTVLEGDNMETPVTLINFW |
| | | | PVDSAPASSPQLSHDDTHSRIEHYAS |
| | | | RLAEMENSSGSYLNDSISPNESIDDE |
| | | | HLLIQHYCQSLNQDSPLSQPRSPAQIL |
| | | | ISLESEERGELERILADLEEENRNLQA |
| | | | EYDRLKEQHEHKGLSPLPSPPEMMP |
| | | | TSPQSPRDAELIAEAKLLRQHKGRLE |
| | | | ARMQILEDHNKQLESQLHRLRQLLE |
| | | | QPQAEAKVNGTTVSSPSTSLQRSDSS |
| | | | QPMLLRVVGSQTSESMGEEDLLSPP |
| | | | QDSSTGLEEVMEQLNNSFPSSRGRNT |
| | | | PGKPMREDTM |
| SEQ ID | Q05JF3 | Calsequestrin/ | MSAADRMGARAVPGLRLALLLLMV |
| NO: 99 | (UniProtKB) | Bos taurus | LGTPKSGVQGEEGLDFPEYDGVDRV |
| | | | VNVNAKNYKNVFKKYEVLALLYHE |
| | | | PPEDDKASQRQFEMDELILELAAQVL |
| | | | EDKGVGFGMVDSEKDAAVAKKLGL |
| | | | TEEDSVYVFKGDEVIEYDGEFSADTL |
| | | | VEFLLDVLEDPVELIEGERELQAFENI |
| | | | EDDNKLIGYFKNKDSEHYKAYEDAA |
| | | | EEFHPYIPFFATFDSKVAKKLTLKLN |
| | | | EIDFYEAFMEEPVTIPDKPNSEEEIVS |
| | | | FVEAHKRSTLRKLKPESMYETWEDD |
| | | | LDGIHIVAFAEETDPDGYEFLETLKA |
| | | | VAQDNTDNPDLSIIWIDPDDFPLLVP |
| | | | YWEKTFNIDLSAPQIGVVNVTDADS |
| | | | VWMEMDDEEDLPSAEELEDWLEDV |
| | | | LEGEINTEDDDEEDD |

Cardiac muscle tissue

| | | | |
|---|---|---|---|
| SEQ ID | P68034 | Actin, alpha | MCDDEETTALVCDNGSGLVKAGFA |
| NO: 100 | (UniProtKB) | cardiac muscle | GDDAPRAVFPSIVGRPRHQGVMVG |
| | | 1/Gallus gallus | MGQKDSYVGDEAQSKRGILTLKYPI |
| | | | EHGIITNWDDMEKIWHHTFYNELRV |
| | | | APEEHPTLLTEAPLNPKANREKMTQI |
| | | | MFETFNVPAMYVAIQAVLSLYASGR |
| | | | TTGIVLDSGDGVTHNVPIYEGYALPH |
| | | | AIMRLDLAGRDLTDYLMKILTERGY |
| | | | SFVTTAEREIVRDIKEKLCYVALDFE |
| | | | NEMATAASSSSEEKSYELPDGQVITI |
| | | | GNERFRCPETLFQPSFIGMESAGIHET |
| | | | TYNSIMKCDIDIRKDLYANNVLSGGT |
| | | | TMYPGIADRMQKEITALAPSTMKIKII |
| | | | APPERKYSVWIGGSILASLSTFQQMW |
| | | | ISKQEYDEAGPSIVHRKCF |
| SEQ ID | XP_004938861.1 | Gamma- | MVREQYTTTTPGTSLERPKNEYVYKI |
| NO: 101 | (NCBI) | sarcoglycan | GIYGWRKRCLYLFVLLLLIILVVNFS |
| | | isoform | LTIWILKVMWFSPTGMGHLRVTKEG |
| | | X2/Gallus gallus | LRLEGESEFLFPLYAKEIHSRVDSSLL |
| | | | LQSTHNVTVNARNSNGEVTGRLNVG |
| | | | PKMVEFHGQQFQINSKDGKPLFTVD |
| | | | ENEVVIGTDKLRVTGPEGALFEHSVE |
| | | | TPLVKAEAFKQLRLESPTRSLSMDAP |
| | | | RGIN |
| | | | IKAQAGNIEALSQMDIKLHSSDGVLL |
| | | | LDAETVRLPKLPEGTRGGPGVSQGL |
| | | | YEICVCPDGKLYLSVAGLGSTCQEYS |
| | | | RVCQ |
| SEQ ID | NP_990097.1 | Myosin heavy | MMDMTEFGEAAPFLRKSEKELMML |
| NO: 102 | (NCBI) | chain, cardiac | QTVAFDGKKKCWVPDDKKAYVEAE |
| | | muscle | ITESSGGKVTVETTDGRTMTIKEDDV |
| | | isoform/Gallus | QSMNPPKFDMIEDMAMLTHLNEASV |
| | | gallus | LYNLRKRYSNWMIYTYSGLFCVTIN |
| | | | PYKWLPVYKSEVVAAYKGKRRSEA |
| | | | PPHIFSIADNAYHDMLRNRENQSMLI |
| | | | TGESGAGKTVNTKRVIQYFATVAAL |
| | | | GEPGKKSQPATKTGGTLEDQIIQANP |
| | | | ALEAFGNAKTLRNDNSSRFGKFIRIH |
| | | | FGTTGKLSSADIEIYLLEKSRVIFQQP |
| | | | GERDYHIFYQILSGKKPELLDMLLVS |
| | | | TNPYDYHFCSQGVVTVDNLDDGEEL |
| | | | MATDQAMDILGFVPDEKYGAYKLT |
| | | | GAIMHFGNMKFKQRPREEQAEADGT |
| | | | ESADKAAYLMGINSSDLVKGLLHPR |
| | | | VKVGNEYVTKGQSVEQVLYAVGAL |
| | | | SKAVYDRMFKWLVVRINKTLDTKLP |
| | | | RQFFIGVLDIAGFEIFDFNSFEQLCINY |
| | | | TNEKLQQFFNHHMFVLEQEEYKKEG |
| | | | IEWVFIDFGMDLQACIDLIEKPLGILSI |
| | | | LEEECMFPKATDMTFKAKLYDNHLG |
| | | | KSPNLQKPRPDKKRKYEAHFELIHY |
| | | | AGSVPYNIIGWLEKNKDPLNETVVGI |
| | | | FQKSSNKLLASLFESYVGADSADQG |
| | | | GEKKRKKGASFQTVSSLHKENLNKL |
| | | | MTNLRSTAPHFVRCIIPNESKTPGEM |
| | | | DAFLVLHQLRCNGVLEGIRICRKGFP |
| | | | NRVLYADFKQRYRILNPGAIPEDKFV |
| | | | DSRKAAEKLLASLDIDHNQYRFGHT |
| | | | KVFFKAGLLGHLEEMRDERLAKILT |
| | | | MIQARARGRLMRIEFQKIVERRDALL |
| | | | VIQWNIRAFMAVKNWPWMKLFFKI |
| | | | KPLLKSAETEKEMANMKEEFLKLKE |
| | | | ALEKSEARRKELEEKQVSLVQEKND |
| | | | LLLQLQAEQDTLADAEERCDLLIKSK |
| | | | IQLEAKVKELTERVEDEEEMNSELTS |
| | | | KKRKLEDECSELKKDIDDLEITLAKV |
| | | | EKEKHATENKVKNLTEEMATLDENI |
| | | | SKLTKEKKSLQEAHQQVLDDLQAEE |
| | | | DKVNTLSKAKVKLEQQVDDLEGSLE |
| | | | QEKKVRMDLERAKRKLEGDLKLTQ |
| | | | ESVMDLENDKLQMEEKLKKKEFEM |
| | | | SQLNSKIEDEQAIVMQLQKKIKELQA |
| | | | RIEELEEELEAERAARAKVEKQRSDL |
| | | | ARELEVLSERLEEAGGATAAQLEMN |
| | | | KKREAEFLKLARDLEEATLHYEATA |
| | | | AALRKKHADSVAEMGEQLDNLQRV |
| | | | KQKLEKEKSELKMEVDDLTSNMEQT |
| | | | VKGKANAEKLCRTYEDHLNETKTKL |
| | | | DEMTRLMNDLTTQKTKLQSENGEFV |
| | | | RQLEEKESLISQLSRGKTSFTQQIEEL |
| | | | RRQLEEETKSKNALAHALQAARHDC |
| | | | DLLREQYEEEQEAKAELQRALSKGN |
| | | | AEVAQWRTKYETDAIQRTEELEDAK |
| | | | KKLAARLQEAEEAIEAANAKCSSLE |
| | | | KTKHRLQNELEDMMIDLEKANSAA |
| | | | ASLDKKQRGFDKIINDWKQKYEESQ |
| | | | AELEASQKEARSLSTELFKLKNAYEE |
| | | | TLDHLETLKRENKNLQEEISDLTNQI |
| | | | SEGNKNLHEIEKVKKQVEQEKSEVQ |
| | | | LALEEAEGALEHEESKTLRFQLELSQ |
| | | | LKADFERKLAEKDEEMENIRRNQQR |
| | | | TIDSLQSTLDSEARSRNEAIRLKKKM |
| | | | EGDLNEMEIQLSHANRHAAEATKSA |
| | | | RGLQTQIKELQVQLDDLGHLNEDLK |
| | | | EQLAVSDRRNNLLQSELDELRALLD |
| | | | QTERARKLAEHELLEATERVNLLHT |
| | | | QNTSLINQKKKLEGDISQMQNEVEES |
| | | | IQECRNAEEKAKKAITDAAMMAEEL |
| | | | KKEQDTSAHLERMKKNMEQTIKDL |
| | | | QKRLDEAEQIALKGGKKQIQKLESR |
| | | | VRELENELENELRRNSDAQKGARKF |
| | | | ERRIKEVTYQSEEDKKNLARMQDLI |
| | | | DKLQLKVKSYKHQAEEAEAQANLY |
| | | | LSKYRKQQHDLDDAEERAEIAESQV |
| | | | NKLRSKSRDIGMKKVHEEE |
| SEQ ID | Q90688 | Myosin-binding | MPEPAKKAVSAFTKKPKTTEVAAGS |
| NO: 103 | (UniProtKB) | protein C, | TAVFEAETEKTGIKVKWQRAGTEIT |
| | | cardiac- | DSEKYAIKAEGNKHSLTISNVGKDDE |
| | | type/Gallus | VTYAVIAGTSKVKFELKVKEPEKSEP |
| | | gallus | VAPAEASPAPAASELPAPPVESNQNP |
| | | | EVPPAETQPEEPVDPIGLFVTRPQDG |
| | | | EVTVGGNITFTAKVAGESLLKKPSVK |
| | | | WFKGKWMDLASKVGKHLQLHDNY |
| | | | DRNNKVYTFEMEIIEANMTFAGGYR |
| | | | CEVSTKDKFDSSNFNLIVNEAPVSGE |
| | | | MDIRAAFRRTSLAGGGRRMTSAFLS |
| | | | TEGLEESGELNFSALLKKRDSFLRTA |
| | | | NRGDGKSDSQPDVDVWEILRKAPPS |
| | | | EYEKIAFQYGITDLRGMLKRLKRIKK |
| | | | EEKKSTAFLKKLDPAYQVDKGQKIK |
| | | | LMVEVANPDADVKWLKNGQEIQVS |
| | | | GSKYIFEAIGNKRILTINHCSLADDAA |
| | | | YECVVAEEKSFTELFVKEPPILITHPL |
| | | | EDQMVMVGERVEFECEVSEEGATV |
| | | | KWEKDGVELTREETFKYRFKKDGK |
| | | | KQYLIINESTKEDSGHYTVKTNGGVS |
| | | | VAELIVQEKKLEVYQSIADLTVKAR |
| | | | DQAVFKCEVSDENVKGIWLKNGKE |
| | | | VVPDERIKISHIGRIHKLTIEDVTPGD |
| | | | EADYSFIPQGFAYNLSAKLQFLEVKI |
| | | | DFVPREEPPKIHLDCLGQSPDTIVVV |
| | | | AGNKLRLDVPISGDPTPTVIWQKVN |
| | | | KKGELVHQSNEDSLTPSENSSDLSTD |
| | | | SKLLFESEGRVRVEKHEDHCVFIIEG |
| | | | AEKEDEGVYRVIVKNPVGEDKADIT |
| | | | VKVIDVPDPPEAPKISNIGEDYCTVQ |
| | | | WQPPTYDGGQPVLGYILERKKKKSY |
| | | | RWMRLNFDLLKELTYEAKRMIEGV |
| | | | VYEMRIYAVNSIGMSRPSPASQPFMP |
| | | | IAPPSEPTHFTVEDVSDTTVALKWRP |
| | | | PERIGAGGLDGYIVEYCKDGSAEWT |
| | | | PALPGLTERTSALIKDLVTGDKLYFR |
| | | | VKAINLAGESGAAIIKEPVTVQEIMQ |
| | | | RPKICVPRHLRQTLVKKVGETINIMIP |
| | | | FQGKPRPKISWMKDGQTLDSKDVGI |
| | | | RNSSTDTILFIRKAELHHSGAYEVTL |
| | | | QIENMTDTVAITIQIIDKPGPPQNIKL |
| | | | ADVWGFNVALEWTPPQDDGNAQIL |
| | | | GYTVQKADKKTMEWYTVYDHYRR |
| | | | TNCVVSDLIMGNEYFFRVFSENLCGL |
| | | | SETAATTKNPAYIQKTGTTYKPPSYK |
| | | | EHDFSEPPKFTHPLVNRSVIAGYNTT |
| | | | LSCAVRGIPKPKIFWYKNKVDLSGD |
| | | | AKYRMFSKQGVLTLEIRKPTPLDGGF |
| | | | YTCKAVNERGEAEIECRLDVRVPQ |
| SEQ ID | F1NBZ9 | Myosin-binding | MPEPAKKAVSAFTKKPKTTEVAAGS |
| NO: 104 | (UniProtKB) | protein C, | TAVFEAETEKTGIKVKWQRAGTEIT |
| | | cardiac- | DSEKYAIKAEGNKHSLTISNVGKDDE |
| | | type/Gallus | VTYAVIAGTSKVKFELKVKEPEKSEP |
| | | gallus | VAPAEASAPAASELPAPPVESNQNPE |
| | | | VPPAETQPEEPVDPIGLFVTRPQDGE |
| | | | VTVGGNITFTAKVAGESLLKKPSVK |
| | | | WFKGKWMDLASKVGKHLQLHDNY |
| | | | DRNNKVYTFEMEIIEANMTFAGGYR |
| | | | CEVSTKDKFDSSNFNLIVNEAPVSGE |
| | | | MDIRAAFRRTSLAGGGRRMTSAFLS |
| | | | TEGLEESGELNFSALLKKSSSFLRTA |
| | | | NRGDGKSDSQPDVDVWEILRKAPPS |
| | | | EYEKIAFQYGITDLRGMLKRLKRIKK |
| | | | EEKKSTAFLKKLDPAYQVDKGQKIK |
| | | | LMVEVANPDADVKWLKNGQEIQVS |
| | | | GSRYIFEAIGNKRILTINHCSLADDAA |
| | | | YECVVAEEKSFTELFVKEPPILITHPL |
| | | | EDQMVMVGERVEFECEVSEEGATV |
| | | | KWEKDGVELTREETFKYRFKKDGK |
| | | | KQYLIINESTKEDSGHYTVKTNGGVS |
| | | | VAELIVQEKKLEVYQSIADLTVKAR |
| | | | DQAVFKCEVSDENVKGIWLKNGKE |
| | | | VVPDERIKISHIGRIHKLTIEDVTPGD |
| | | | EADYSFIPQGFAYNLSAKLQFLEVKI |
| | | | DFVPREEPPKIHLDCLGQSPDTIVVV |
| | | | AGNKLRLDVPISGDPTPTVIWQKVN |
| | | | KKGELVHQSNEDSLTPSENSSDLSTD |
| | | | SKLLFESEGRVRVEKHEDHCVFIIEG |
| | | | AEKEDEGVYRVIVKNPVGEDKADIT |
| | | | VKVIDVPDPPEAPKISNIGEDYCTVQ |
| | | | WQPPTYDGGQPVLGYILERKKKKSY |
| | | | RWMRLNFDLLKELTYEAKRMIEGV |
| | | | VYEMRIYAVNSIGMSRPSPASQPFMP |
| | | | IAPPSEPTHFTVEDVSDTTVALKWRP |
| | | | PERIGAGGLDGYIVEYCKDGSAEWT |
| | | | PALPGLTERTSALIKDLVTGDKLYFR |
| | | | VKAINLAGESGAAIIKEPVTVQEIMQ |
| | | | RPKIWLPRHLRQTLVKKVGETINIMI |
| | | | PFQGKPRPKISWMKDGQTLDSKDVG |
| | | | IRNSSTDTILFIRKAELHHSGAYEVTL |
| | | | QIENMTDTVAITIQIIDKPGPPQNIKL |
| | | | ADVWGFNVALEWTPPQDDGNAQIL |
| | | | GYTVQKADKKTMEWYTVYDHYRR |
| | | | TNCVVSDLIMGNEYFFRVFSENLCGL |
| | | | SETAATTKNPAYIQKTGTTYKPPSYK |
| | | | EHDFSEPPKFTHPLVNRSVIAGYNTT |
| | | | LSCAVRGIPKPKIFWYKNKVDLSGD |
| | | | AKYRMFSKQGVLTLEIRKPTPFDGGF |
| | | | YTCKAVNERGEAEIECRLDVRVPQ |
| SEQ ID | NP_998735.1 | Troponin 1, | MAEEEEPKPPPLRRKSSANYRGYAV |
| NO: 105 | (NCBI) | cardiac | EPHAKRQSKISASRKLQLKTLLLQRA |
| | | muscle/Gallus | KRELEREEQERAGEKQRHLGELCPPP |
| | | gallus | ELEGLGVAQLQELCRELHARIGRVD |
| | | | EERYDMGTRVSKNMAEMEELRRRV |
| | | | AGGRFVRPALRRVRLSADAMMAAL |
| | | | LGSKHRVGTDLRAGLRQVRKDDAE |
| | | | KESREVGDWRKNVDALSGMEGRKK |
| | | | KFEAPGGGQG |
| SEQ ID | A0A1D5PF28 | Troponin T, | MKQKHQEKGESKPKPKPFMPNLVPP |
| NO: 106 | (UniProtKB) | cardiac muscle | KIPDGERLDFDDIHRKRMEKDLNEL |
| | | isoforms/Gallus | QALIEAHFESRKKEEEELISLKDRIEQ |
| | | gallus | RRAERAEQQRIRSEREKERQARMAE |
| | | | ERARKEEEEARKKAEEEARKKKAFS |
| | | | NMLHFGGYMQKSEKKGGKKQTERE |
| | | | KKKKILSERRKPLNIDHLSEDKLRDK |
| | | | AKELWQTIRDLEAEKFDLQEKFKRQ |
| | | | KYEINVLRNRVSDHQKV |
| SEQ ID | F1RRT2 | Myosin light | MPPKKPEPKKEAAKAAPAPAPAPAP |
| NO: 107 | (UniProtKB) | chain 4/Sus | APAPPPEPAKEPTFDPKSIKIDFTADQI |
| | | scrofa | EEFKEAFSLFDRTPTGEMKITYGQCG |
| | | | DVLRALGQNPTNAEVLRVLGKPKPE |
| | | | EMNAKMLDFETFLPILQHISRNKEQG |
| | | | TYEDFVEGLRVFDKESNGTVMGAEL |
| | | | RHVLATLGEKMTEAEVEQLLAGQED |
| | | | ANGCINYEAFVKHIMSG |
| SEQ ID | Q910C5 | Atrial myosin | MEALLGAAAPFLRAPEGPRPTPAGD |
| NO: 108 | (UniProtKB) | heavy | TRGLCFVPHPQLEFIRARVTARAGNG |
| | | chain/Gallus | VTVTTEMGETLTVPEADVHPQNPPK |
| | | gallus | FDRIEDMAMLTFLHEPAVLYNLKER |
| | | | YASWMIYTYSGLFCVTVNPYKWLPV |
| | | | YNAEVVAAYRGKKRTEVPPHIFSISD |
| | | | NAYQNMLTDRENQSILITGESGAGK |
| | | | TVNTKRVIQYFASIAAIGHRKKEVAN |
| | | | SSKGTLEDQIIQANPALEAFGNAKTV |
| | | | RNDNSSRFGKFIRIHFGATGKLASADI |
| | | | ETYLLEKSRVIFQLKAERNYHIFYQIL |
| | | | SNKKPELLEMLLITNNPYDYSYVSQG |
| | | | EVTVASIDDSEELLATDSAFDVLGFT |
| | | | AEEKAGVYKLTGAIMHFGNMKFKQ |
| | | | KQREEQAEPDGTEDCDKSAYLMGL |
| | | | NSADLLKGLCHPRVKVGNEYVTKG |
| | | | QSVQQVYYSIGALAKAVYEKMFNW |
| | | | MVVRINNSLETKQPRQYFIGVLDIAG |
| | | | FEIFDFNSFEQLCINFTNEKLQQFFNH |
| | | | HMFVLEQEEYKKEGIEWEFIDFGMD |
| | | | LQACIDLIEKPMGIMSILEEECMFPKA |
| | | | SDMTFKAKLFDNHLGKSANFGKPRN |
| | | | VKGKSEAHFSLIHYAGTVDYNIIGWL |
| | | | EKNKDPLNETVVGLYQKSALKLLAS |
| | | | LFSNYAGADAGGDGGKGKGAKKKG |
| | | | SSFQTVSALHRENLNKLMANLKTTH |
| | | | PHFVRCLIPNERKEPGVMDNPLVMH |
| | | | QLRCNGVLEGIRICRKGFPNRILYGD |
| | | | FRQRYRIPNPTAIPEGQFIDSRKGAEK |
| | | | LLGSLDIDHNQYKFGHTKVFFKAGL |
| | | | LGLLEEMRDERLSLIITRIQAQARGQ |
| | | | LMRIEFKKILERRDALLVIQWNIRAF |
| | | | MGVKNWPWMKLYFKIKPLLKSAET |
| | | | EKEMQTMKEEFGHLKEALEKSAARR |
| | | | KELEEKMVSMLQEKNDLQLQVQAE |
| | | | QDNLADAEERCDQLIKNKIQLEAKV |
| | | | KEMTERLEEEEEMNAELAAKKRKLE |
| | | | DECSELKKDIDDLELSLAKVEKEKH |
| | | | ATENKVKNLTEEMAGLDENITKLTK |
| | | | EKKILQESHQQALDDLQAEEDKVNT |
| | | | LAKAKGKLEQQVDDLESSLEQEKKI |
| | | | RMDLERAKRKLEGDLKLAQESIMDL |
| | | | ENDKQQLEERLKKKDFELNTLNARI |
| | | | EDEQAISAQLQKKLKELQARIEELEE |
| | | | ELEAERTGRAKVEKLRSELLQELEET |
| | | | SERLEEAGGATSVQLELNKKREAEF |
| | | | QKLRRDLEEATLQHEATAATLRKKH |
| | | | ADSVAELSEQLDNLQRVKQKLEKEK |
| | | | SELKLELDDVNSNTEQLIKAKTNLEK |
| | | | MCRTTEDQMNEHRSKLEEAQRTVT |
| | | | DLSTQRAKLQTENSELSRQLEEKEAF |
| | | | INQLTRGKLTYTQQLEDLKRQLEEEA |
| | | | KAKNALAHALQSAQHDCDLLREQY |
| | | | EEEMEAKAELQRALSKANSEVAQW |
| | | | RTKYETDAIQRTEELEEAKKKLAQR |
| | | | LQEAEEAVEAVNAKCSSLEKTKHRL |
| | | | QNEIEDLMADVERSNAAAAALDKK |
| | | | QRNFDKILSEWKQKFEESQTELEASQ |
| | | | KEARSLSTELFKLKNAYEESLEHLET |
| | | | FKRENKNLQEEILDLTEQLGASQKSI |
| | | | HELEKVRKQLDAEKLELQAALEEAE |
| | | | ASLEHEEGKILRAQLEFNQVKADYE |
| | | | RKLAEKDEEIEQSKRNHLRVVDSLQ |
| | | | TSLDAETRSRNEALRLKKKMEGDLN |
| | | | EMEIQLSHANRTAAEAQKQVKALQG |
| | | | YLKDTQLQLDDVVRANEDLKENIAI |
| | | | VERRNNLLQSELEELRAMVEQSERA |
| | | | RKLAEQELIEASERVQLLHSQNTSLI |
| | | | NQKKKMEADISQLQTEVEEAIQECR |
| | | | NAEEKAKKAITDAAMMAEELKKEQ |
| | | | DTSAHLERMKKNMEQTVKDLQLRL |
| | | | DEAEQLALKGGKKQLQKLEVRVREL |
| | | | ENELEAEQKRNAESIKGLRKSERRVK |
| | | | ELSYQTEEDRKNMVRLQDLVDKLQL |
| | | | KVKAYKRQAEEAEEQANSNLAKFR |
| | | | KVQHELDEAEERADMAESQVNKLR |
| | | | ARSRDIGAKKGLNEE |
| SEQ ID | Q8UWA0 | Myosin heavy | MSMLDMSEFGEAAEYLRKSYTEQLK |
| NO: 109 | (UniProtKB) | chain/Gallus | LQTIPFDGKKRAWIPDEKEAYIEVEIK |
| | | gallus | ESTGGKVTVETKDKQTRVVKEDELQ |
| | | | AMNPPKFDMIEDMAMLTHLNEASV |
| | | | LYNLKRRYSHWMIYTYSGLFCVTIN |
| | | | PYKWLPVYTAPVVAAYKGKRRSEA |
| | | | PPHIYSIADNAYNDMLRNRENQSMLI |
| | | | TGESGAGKTVNTKRVIQYFAIVAAL |
| | | | GDTPGKKVAALATKTGGTLEDQIIEA |
| | | | NPAMEAFGNAKTIRNDNSSRFGKFIR |
| | | | IHFGPSGKLASADIDIYLLEKSRVIFQ |
| | | | QPKERSYHIYYQILSGKKPELQDMLL |
| | | | LSLNPYDYHFCSQGVTTVDNLDDGE |
| | | | ELMATDHAMDILGFSNDEKYGSYKI |
| | | | VGAIMHFGNMKFKQKQREEQAEAD |
| | | | GTESADKAAYLMGISSADLIKGLLHP |
| | | | RVKVGNEYVTKGQNVEQVVYAVGA |
| | | | LAKATYDRMFKWLVTRINKTLDTKL |
| | | | ARQFFIGVLDIAGFEIFDFNSFEQLCIN |
| | | | FTNEKLQQFFNHHMFVLEQEEYKKE |
| | | | GIEWVFIDFGLDLQACIDLIEKPLGIL |
| | | | SILEEECMFPKASDMSFKAKLYDNH |
| | | | LGKSPNFQKPRPDKKRKYEAHFELV |
| | | | HYAGVVPYNIIGWLDKNKDPLNETV |
| | | | VAVFQKSQNKLLASLYENYVGSSSE |
| | | | EPHKPGSKEKRKKAASFQTVSQLHK |
| | | | ENLNKLMTNLRSTQPHFVRCIIPNET |
| | | | KTPGAMDAFLVLHQLRCNGVLEGIR |
| | | | ICRKGFPNRILYADFKQRYRILNPAAI |
| | | | PDDKFVDSRKATEKLLSSLELDHSQY |
| | | | KFGHTKVFFKAGLLGMLEEMRDERL |
| | | | AKILTMLQARIRGHLMRIEYQKIISRR |
| | | | EALYTIQWNIRAFNAVKNWSWMKL |
| | | | FFKIKPLLKSAQTEKEMSTLKEEFQK |
| | | | LKEALEKSEAKRKELEEKQVSMIQE |
| | | | KNDLALQLQAEQDNLADAEERCDLL |
| | | | IKSKIQLEAKVKELTERVEDEEEMNA |
| | | | DLTAKKRKLEDECAELKKDIDDLEIT |
| | | | LAKVEKEKHATENKVKNLIEEMAAL |
| | | | DEIIAKLTKEKKALQEAHQQALDDL |
| | | | QAEEDKVNTLTKAKVKLEQQVDDL |
| | | | ESSLEQEKKIRMDLERAKRKLEGDL |
| | | | KLTQESVMDLENDKQQLEEKLKKK |
| | | | DFEMSQLNSRIEDQQVTEAQLQKKIK |
| | | | ELQARIEELEEELEAERAARAKVEKQ |
| | | | RAEVSRELEELSERLEEAGGATSAQL |
| | | | EMNKKREVEFLKLRRDLEEATLQHE |
| | | | STAAALRKKHADSVAELSEQIDNLQ |
| | | | RVKQKLEKEKSEMKMEVDDLSSNIE |
| | | | YLTKNKANAEKLCRTYEDQLSEAKS |
| | | | KVDELQRQLTDVSTQRGRLQTENGE |
| | | | LSRLLEEKESFINQLSRGKTSFTQTIE |
| | | | ELKRQLEEETKSKNALAHALQASRH |
| | | | DCDLLREQYEEEVEAKSELQRNLSK |
| | | | ANAEVAQWRTKYETDAIQRTEELEE |
| | | | AKKKLAIRLQEAEEAVEAAHAKCSS |
| | | | LEKTKHRLQTEIEDLSVDLERANSAC |
| | | | AALDKKQRNFDRILAEWKQKYEETQ |
| | | | AELEASQKESRSLSTELFKLKNAYEE |
| | | | SLDNLETLKRENKNLQEEIADLTDQI |
| | | | SMSGKTIHELEKLKKALENEKSDIQA |
| | | | ALEEAEGALEHEESKTLRIQLELNQI |
| | | | KADVDRKLAEKDEEFENLRRNHQR |
| | | | AMDSMQATLDAEARAKNEAVRLRK |
| | | | KMEGDLNEMEIQLSHANRQAAEFQK |
| | | | LGRQLQAQIKDLQIELDDTQRQNDD |
| | | | LKEQAAALERRNNLLLAEVEELRAA |
| | | | LEQAERSRKLAEQELLEATERVNLL |
| | | | HSQNTGLINQKKKLETDISQLSSEVE |
| | | | DAVQECRNAEEKAKKAITDAAMMA |
| | | | EELKKEQDTSAHLERMKKNMEQTIK |
| | | | DLQMRLDEAEQIALKGGKKQIQKLE |
| | | | ARVRELEGELDMEQKKMAEAQKGI |
| | | | RKYERRIKELSYQTEEDRKNLTRMQ |
| | | | DLIDKLQSKVKSYKRQFEEAEQQAN |
| | | | SNLVKYRKVQHELDDAEERADIAET |
| | | | QVNKLRARTKEVITFKHE |
| SEQ ID | P79293 | Myosin-7/Sus | MVDAEMAAFGEAAPYLRKSEKERL |
| NO: 110 | (UniProtKB) | scrofa | EAQTRPFDLKKDVYVPDDKEEFVKA |
| | | | KILSREGGKVTAETEHGKTVTVKED |
| | | | QVLQQNPPKFDKIEDMAMLTFLHEP |
| | | | AVLYNLKERYASWMIYTYSGLFCVT |
| | | | INPYKWLPVYNAEVVAAYRGKKRSE |
| | | | APPHIFSISDNAYQYMLTDRENQSILI |
| | | | TGESGAGKTVNTKRVIQYFAVIAAIG |
| | | | DRSKKEQTPGKGTLEDQIIQANPALE |
| | | | AFGNAKTVRNDNSSRFGKFIRIHFGA |
| | | | TGKLASADIETYLLEKSRVIFQLKAE |
| | | | RDYHIFYQILSNKKPELLDMLLITNN |
| | | | PYDYAFISQGETTVASIDDAEELMAT |
| | | | DNAFDVLGFTSEEKNSMYKLTGAIM |
| | | | HFGNMKFKLKQREEQAEPDGTEEAD |
| | | | KSAYLMGLNSADLLKGLCHPRVKV |
| | | | GNEYVTKGQNVQQVMYATGALAK |
| | | | AVYEKMFNWMVTRINTTLETKQPR |
| | | | QYFIGVLDIAGFEIFDFNSFEQLCINFT |
| | | | NEKLQQFFNHHMFVLEQEEYKKEGI |
| | | | EWEFIDFGMDLQACIDLIEKPMGIMS |
| | | | ILEEECMFPKATDMTFKAKLYDNHL |
| | | | GKSNNFQKPRNIKGRPEAHFALIHYA |
| | | | GTVDYNIIGWLQKNKDPLNETVVDL |
| | | | YKKSSLKLLSNLFANYAGADTPVEK |
| | | | GKGKAKKGSSFQTVSALHRENLNKL |
| | | | MTNLRSTHPHFVRCIIPNETKSPGVID |
| | | | NPLVMHQLRCNGVLEGIRICRKGFPN |
| | | | RILYGDFRQRYRILNPAAIPEGQFIDS |
| | | | RKGAEKLLGSLDIDHNQYKFGHTKV |
| | | | FFKAGLLGLLEEMRDERLSRIITRIQA |
| | | | QSRGVLSRMEFKKLLERRDSLLIIQW |
| | | | NIRAFMSVKNWPWMKLYFKIKPLLK |
| | | | SAETEKEMATMKEEFGRLKEALEKS |
| | | | EARRKELEEKMVSLLQEKNDLQLQV |
| | | | QAEQDNLADAEERCDQLIKNKIQLE |
| | | | AKVKEMTERLEDEEEMNAELTAKK |
| | | | RKLEDECSELKRDIDDLELTLAKVEK |
| | | | EKHATENKVKNLTEEMAGLDEIIAK |
| | | | LTKEKKALQEAHQQALDDLQAEED |
| | | | KVNTLTKAKVKLEQHVDDLEGSLEQ |
| | | | EKKVRMDLERAKRKLEGDLKLTQES |
| | | | IMDLENDKQQLDERLKKKDFELNAL |
| | | | NARIEDEQALGSQLQKKLKELQARIE |
| | | | ELEEELEAERTARAKVEKLRSDLSRE |
| | | | LEEISERLEEAGGATSVQIEMNKKRE |
| | | | AEFQKMRRDLEEATLQHEATAAALR |
| | | | KKHADSVAELGEQIDNLQRVKQKLE |
| | | | KEKSEFKLELDDVTSNMEQIIKAKAN |
| | | | LEKMCRTLEDQMNEHRSKAEETQRS |
| | | | VNDLTSQRAKLQTENGELSRQLDEK |
| | | | EALISQLTRGKLTYTQQLEDLKRQLE |
| | | | EEVKAKNALAHALQSARHDCDLLRE |
| | | | QYEEETEAKAELQRVLSKANSEVAQ |
| | | | WRTKYETDAIQRTEELEEAKKKLAQ |
| | | | RLQDAEEAVEAVNAKCSSLEKTKHR |
| | | | LQNEIEDLMVDVERSNAAAAALDKK |
| | | | QRNFDKILAEWKQKYEESQSELESSQ |
| | | | KEARSLSTELFKLKNAYEESLEHLET |
| | | | FKRENKNLQEEISDLTEQLGSSGKTI |
| | | | HELEKVRKQLEAEKLELQSALEEAE |
| | | | ASLEHEEGKILRAQLEFNQIKAEMER |
| | | | KLAEKDEEMEQAKRNHLRVVDSLQ |
| | | | TSLDAETRSRNEALRVKKKMEGDLN |
| | | | EMEIQLSHANRMAAEAQKQVKSLQS |
| | | | LLKDTQIQLDDAVRANDDLKENIAIV |
| | | | ERRNNLLQAELEELRAVVEQTERSR |
| | | | KLAEQELIETSERVQLLHSQNTSLINQ |
| | | | KKKMEADLSQLQTEVEEAVQECRN |
| | | | AEEKAKKAITDAAMMAEELKKEQD |
| | | | TSAHLERMKKNMEQTIKDLQHRLDE |
| | | | AEQIALKGGKKQLQKLEARVRELEN |
| | | | ELEAEQKRNAESVKGMRKSERRIKE |
| | | | LTYQTEEDRKNLLRLQDLVDKLQLK |
| | | | VKAYKRQAEEAEEQANTNLSKFRKV |
| | | | QHELDEAEERADIAESQVNKLRAKS |
| | | | RDIGTKGLNEE |
| SEQ ID | E1BJ10 | Myosin binding | MEAATAPEAALRPTLKVKEASPADA |
| NO: 111 | (UniProtKB) | protein H | DGPQASPRRGTGSPLSQLLPPIEEHPK |
| | | like/Bos taurus | IWLPRALRQTYIRKVGDTVNLLIPFQ |
| | | | GKPKPQAIWTRDGCALDTSRVSVRN |
| | | | GERDSILFIREAQRADSGRYQLSVQL |
| | | | GGLEATATIDILVIERPGPPQSIKLVD |
| | | | VWGSSATLEWTPPQDTGNAALLGYT |
| | | | VQKADTKSGLWFTVLERCRRASCTV |
| | | | PNLIVGNSYTFRVFAENQCGLSENAP |
| | | | ITADLAHIQKAATVYRTEGFAQRDFS |
| | | | EAPKFTQPLADCTTVIGYDTQLFCCV |
| | | | RASPKPKIIWLKNKMDIQGNPKYRA |
| | | | LTHLGICSLEIRKPGPFDGGIYTCKAV |
| | | | NPLGEASVDCRVDVKAPN |
| SEQ ID | P02540 | Desmin/Sus | MSQAYSSSQRVSSYRRTFGGAPSFPL |
| NO: 112 | (UniProtKB) | scrofa | GSPLSSPVFPRAGFGTKGSSSSVTSRV |
| | | | YQVSRTSGGAGGLGPLRASRLGATR |
| | | | VPSSSYGAGELLDFSLADAVNQEFLT |
| | | | TRTNEKVELQELNDRFANYIEKVRFL |
| | | | EQQNAALAAEVNRLKGREPTRVAEI |
| | | | YEEELRELRRQVEVLTNQRARVDVE |
| | | | RDNLLDDLQRLKAKLQEEIQLKEEA |
| | | | ENNLAAFRADVDAATLARIDLERRIE |
| | | | SLNEEIAFLKKVHEEEIRELQAQLQE |
| | | | QQVQVEMDMSKPDLTAALRDIRAQ |
| | | | YETIAAKNISEAEEWYKSKVSDLTQA |
| | | | ANKNNDALRQAKQEMMEYRHQIQS |
| | | | YTCEIDALKGTNDSLMRQMRELEDR |
| | | | FASEASGYQDNIARLEEEIRHLKDEM |
| | | | ARHLREYQDLLNVKMALDVEIATYR |
| | | | KLLEGEESRINLPIQTFSALNFRETSPE |
| | | | QRGSEVHTKKTVMIKTIETRDGEVVS |
| | | | EATQQQHEVL |
| SEQ ID | F1SFP9 | Leiomodin | MSEHSRNSDQEEPFDREIDEDEILAN |
| NO: 113 | (UniProtKB) | 3/Sus scrofa | LSPEELKELQSEMDVMAPDPRLPVG |
| | | | MIQKDQTDKPPTGNFDHKSLVDYM |
| | | | YWQKASRRMLEDERVPVTFVPSEEK |
| | | | PQEQRKEIDKGNKNMSQYLKEKLNN |
| | | | EIAAHKRESKSSDNEQETNDDDEDN |
| | | | EDDEDDEEDDAEDEEDEGDESDEKT |
| | | | KGEEEGEVKEPIRNGESNCQQVPNK |
| | | | AFEEQKDRPEAQEKFEKKISKLDPKK |
| | | | LALDTSFLKVSARPSGNQTDLDGSLR |
| | | | RVRQNDPDMKELNLNNIENIPKEML |
| | | | LDFVNAMKKNKHIKTFSLANVGADE |
| | | | SVAFALANMLRENRSITTLNIESNFIT |
| | | | GKGIVAIMRCLQFNETLTELRFHNQR |
| | | | HMLGHHAEMEISRLLKANTTLLKMG |
| | | | YHFELPGPRMVVTNLLTRNQDKQRQ |
| | | | KRQEEQKQQQLKEQKKLIAMLENGL |
| | | | GLPPGMWEMLGGPMPDSQMQEFLQ |
| | | | PPPPKSLHPQTAPFSRRNEVMAKPAQ |
| | | | PPKYRTDPDSFRVVKLKRIQRKSRMP |
| | | | EAREPPEKTNLKDVIKTLKPVPRNRP |
| | | | PPLVEITPRDQLLNDIRHSNIAYLKPV |
| | | | QLPKELA |
| SEQ ID | Q5KR49 | Tropomyosin | MDAIKKKMQMLKLDKENALDRAEQ |
| NO: 114 | (UniProtKB) | alpha-1 | AEADKKAAEDRSKQLEDELVSLQKK |
| | | chain/Bos taurus | LKATEDELDKYSEALKDAQEKLELA |
| | | | EKKATDAEADVASLNRRIQLVEEEL |
| | | | DRAQERLATALQKLEEAEKAADESE |
| | | | RGMKVIESRAQKDEEKMEIQEIQLKE |
| | | | AKHIAEDADRKYEEVARKLVIIESDL |
| | | | ERAEERAELSEGKCAELEEELKTVTN |
| | | | NLKSLEAQAEKYSQKEDKYEEEIKV |
| | | | LSDKLKEAETRAEFAERSVTKLEKSI |
| | | | DDLEDELYAQKLKYKAISEELDHAL |
| | | | NDMTSI |
| SEQ ID | F1NK75 | Tropomyosin | MEAIKKKMQMLKLDKENAIDRAEQ |
| NO: 115 | (UniProtKB) | 4/Gallus gallus | AETDKKAAEDKCKQVEDELVALQK |
| | | | KLKGTEDELDKYSEALKDAQEKLEQ |
| | | | AEKKATDAEGEVAALNRRIQLVEEE |
| | | | LDRAQERLATALQKLEEAEKAADES |
| | | | ERGMKVIENRAMKDEEKMEIQEMQ |
| | | | LKEAKHIAEEADRKYEEVARKLVILE |
| | | | GELERAEERAEVSEVKCSDLEEELKN |
| | | | VTNNLKSLEAQSEKYSEKEDKYEEEI |
| | | | KILSDKLKEAETRAEFAERTVAKLEK |
| | | | SIDDLEDELYAQKLKYKAISEELDHA |
| | | | LNDMTSL |
| SEQ ID | H9L074 | Tropomyosin/ | MEAIKKKMQMLKLDKENALDRAEQ |
| NO: 116 | (UniProtKB) | Gallus gallus | AEAEQKQAEERSKQLEDELAAMQK |
| | | | KLKGTEDELDKYSEALKDAQEKLEL |
| | | | AEKKAADAEAEVASLNRRIQLVEEE |
| | | | LDRAQERLATALQKLEEAEKAADES |
| | | | ERGMKVIENRALKDEEKMELQEIQL |
| | | | KEAKHIAEEADRKYEEVARKLVIIEG |
| | | | DLERTEERAELAESKCSELEEELKNV |
| | | | TNNLKSLEAQAEKYSQKEDKYEEEI |
| | | | KILTDKLKEAETRAEFAERSVAKLEK |
| | | | TIDDLEDELYAQKLKYKAISEELDHA |
| | | | LNDMTSMARRALQESSFGEMGHLP |
| | | | WFPEPQRVYPVSGRVDFFSGMGGLT |
| | | | YGLKRT |
| SEQ ID | E1BTG2 | Leiomodin- | MSTFGYRRELSKYEDIDEDELLASLT |
| NO: 117 | (UniProtKB) | 2/Gallus gallus | EEELKELERELEDIEPDRNLPVGQRQ |
| | | | KSLTEKTPTGTFSREALMAYWERET |
| | | | RKLLEKERLGACEKDSEQEEDNSEDI |
| | | | QEECFTESNSEVSEEAYTEEDDEEEE |
| | | | EEEEEEEDEDDSDDEDEEKQNSAASE |
| | | | RPVNCEDGRSSSHVRHKKCSNAKNS |
| | | | ENLFNGHDGKDTENLSFKSSAIHPCG |
| | | | NPTVIEDALEKVRSNDPETTEVNLNN |
| | | | IENITSQMLIQFSQALRDNTVVKSFSL |
| | | | ANTHADDNVAIAIAGMLKVNQHITS |
| | | | LNIESNFITGKGVLAIMRALQHNKVL |
| | | | TELRFHNQRHIMGSQVEMDIVKLLK |
| | | | ENTTLVKLGYHFDLAGPRMSMTSIL |
| | | | TRNMDKQRQKRMQEQRQQEYGCD |
| | | | GAINPKTKVLQKGTPRSSPYTSPKSSP |
| | | | WSSPKLPRKSAPAKSQPPAPAPPPPPP |
| | | | PPPPPPPPPPPVIPDKKAPTRNIAEVIK |
| | | | QQESSRKALQNGQKKKKGKKGKKH |
| | | | ENSILKEIKDSLKSVSDRKSEEGSRPS |
| | | | TRPSTPQRSLHDNLMEAIRASSIKQL |
| | | | RRVEVPEALR |
| SEQ ID | Q6QGC0 | PDZ and LIM | MPQNVILPGPAPWGFRLSGGIDFNQP |
| NO: 118 | (UniProtKB) | domain protein | LIITRITPGSKAAAANLCPGDVILAID |
| | | 3/Sus scrofa | GYGTESMTHADAQDRIKAAAHQLC |
| | | | LKIDRAETRLWSPQVTEDGKAHPFKI |
| | | | NLESEPQDVNYFEHKHNIRPKPFIIPG |
| | | | RSSGCSTPSGIDGGSGRSTPSSVSTLS |
| | | | TICPGDLKVAAKMAPNIPLEMELPGV |
| | | | KIVHAQFNTPMQLYSDDNIMETLQG |
| | | | QVSTALGETPSMSEPTTASVPPQSDV |
| | | | YRMLHDNRNEPTQPRQSGSFRVLQE |
| | | | LVNDGPDDRPAGTRSVRAPVTKIHG |
| | | | GAGGTQKMPLCDKCGSGIVGAVVK |
| | | | ARDKYRHPECFVCADCNLNLKQKG |
| | | | YFFVEGELYCETHARARMRPPEGYD |
| | | | TVTLYPKA |
| SEQ ID | Q3MHM1 | Calsequestrin/ | MTPSKSSKAPFTFLPSAFLGKKHFAQ |
| NO: 119 | (UniProtKB) | Bos taurus | MKRAHLFVVGVYLLSSCRAEEGLNF |
| | | | PTYDGKDRVVSLTEKNFKQVLKKYD |
| | | | LLCLYYHEPLSSDKVVQKQFQLKEIV |
| | | | LELVAQVLEHKDIGFVMVDAKKEA |
| | | | KLAKKLGFDEEGSLYILKGDRTIEFD |
| | | | GEFAADVLVEFLLDLIEDPVEIINSKL |
| | | | EVQAFERIEDHIKLIGFFKSEESEHYK |
| | | | AFEEAAEHFQPYIKFFATFDKGVAKK |
| | | | LSLKMNEVDFYEPFMDEPIAIPDKPY |
| | | | TEEELVEFVKEHQRPTLRRLRPEDMF |
| | | | ETWEDDLNGIHIVAFAERSDPDGYEF |
| | | | LEILKQVARDNTDNPDLSIVWIDPDD |
| | | | FPLLVAYWEKTFKIDLFKPQIGVVNV |
| | | | TDADSVWMDIPDDDDLPTAEELED |
| | | | WIEDVLSGKINTEDDDNDDEEDEDD |
| | | | DDDDDNSDEEDNDDSDDDDE |

Smooth muscle tissue

| | | | |
|---|---|---|---|
| SEQ ID | P08023 | Actin, aortic | MCEEEDSTALVCDNGSGLCKAGFAG |
| NO: 120 | (UniProtKB) | smooth | DDAPRAVFPSIVGRPRHQGVMVGM |
| | | muscle/Gallus | GQKDSYVGDEAQSKRGILTLKYPIEH |
| | | gallus | GIITNWDDMEKIWHHSFYNELRVAP |
| | | | EEHPTLLTEAPLNPKANREKMTQIMF |
| | | | ETFNVPAMYVAIQAVLSLYASGRTT |
| | | | GIVLDSGDGVTHNVPIYEGYALPHAI |
| | | | MRLDLAGRDLTDYLMKILSERGYSF |
| | | | VTTAEREIVRDIKEKLCYVALDFENE |
| | | | MATAASSSSLEKSYELPDGQVITIGN |
| | | | ERFRCPETLFQPSFIGMESAGIHETTY |
| | | | NSIMKCDIDIRKDLYANNVLSGGTT |
| | | | MYPGIADRMQKEITALAPSTMKIKII |
| | | | APPERKYSVWIGGSILASLSTFQQMW |
| | | | ISKQEYDEAGPSIVHRKCF |
| SEQ ID | P63270 | Actin, gamma- | MCEEETTALVCDNGSGLCKAGFAGD |
| NO: 121 | (UniProtKB) | enteric smooth | DAPRAVFPSIVGRPRHQGVMVGMG |
| | | muscle/Gallus | QKDSYVGDEAQSKRGILTLKYPIEHG |
| | | gallus | IITNWDDMEKIWHHSFYNELRVAPE |
| | | | EHPTLLTEAPLNPKANREKMTQIMFE |
| | | | TFNVPAMYVAIQAVLSLYASGRTTGI |
| | | | VLDSGDGVTHNVPIYEGYALPHAIM |
| | | | RLDLAGRDLTDYLMKILTERGYSFV |
| | | | TTAEREIVRDIKEKLCYVALDFENEM |
| | | | ATAASSSSLEKSYELPDGQVITIGNER |
| | | | FRCPETLFQPSFIGMESAGIHETTYNS |
| | | | IMKCDIDIRKDLYANNVLSGGTTMY |
| | | | PGIADRMQKEITALAPSTMKIKIIAPP |
| | | | ERKYSVWIGGSILASLSTFQQMWISK |
| | | | PEYDEAGPSIVHRKCF |
| SEQ ID | P24032 | Myosin | MSSKRAKTKTTKKRPQRATSNVFAM |
| NO: 122 | (UniProtKB) | regulatory light | FDQSQIQEFKEAFNMIDQNRDGFIDK |
| | | chain 2, smooth | EDLHDMLASLGKNPTDEYLDAMMN |
| | | muscle minor | EAPGPINFTMFLTMFGEKLNGTDPED |
| | | isoform/Gallus | VIRNAFACFDEEATGFIQEDYLRELL |
| | | gallus | TTMGDRFTDEEVDELYREAPIDKKG |
| | | | NFNYIEFTRILKHGAKDKDD |
| SEQ ID | P10587 | Myosin- | MSQKPLSDDEKFLFVDKNFVNNPLA |
| NO: 123 | (UniProtKB) | 11/Gallus gallus | QADWSAKKLVWVPSEKHGFEAASIK |
| | | | EEKGDEVTVELQENGKKVTLSKDDI |
| | | | QKMNPPKFSKVEDMAELTCLNEASV |
| | | | LHNLRERYFSGLIYTYSGLFCVVINP |
| | | | YKQLPIYSEKIIDMYKGKKRHEMPPH |
| | | | IYAIADTAYRSMLQDREDQSILCTGE |
| | | | SGAGKTENTKKVIQYLAWASSHKG |
| | | | KKDTSITQGPSFSYGELEKQLLQANPI |
| | | | LEAFGNAKTVKNDNSSRFGKFIRINF |
| | | | DVTGYIVGANIETYLLEKSRAIRQAK |
| | | | DERTFHIFYYLIAGASEQMRNDLLLE |
| | | | GFNNYTFLSNGHVPIPAQQDDEMFQ |
| | | | ETLEAMTIMGFTEEEQTSILRVVSSV |
| | | | LQLGNIVFKKERNTDQASMPDNTAA |
| | | | QKVCHLMGINVTDFTRSILTPRIKVG |
| | | | RDVVQKAQTKEQADFAIEALAKAKF |
| | | | ERLFRWILTRVNKALDKTKRQGASF |
| | | | LGILDIAGFEIFEINSFEQLCINYTNEK |
| | | | LQQLFNHTMFILEQEEYQREGIEWNF |
| | | | IDFGLDLQPCIELIERPTNPPGVLALL |
| | | | DEECWFPKATDTSFVEKLIQEQGNH |
| | | | AKFQKSKQLKDKTEFCILHYAGKVT |
| | | | YNASAWLTKNMDPLNDNVTSLLNQ |
| | | | SSDKFVADLWKDVDRIVGLDQMAK |
| | | | MTESSLPSASKTKKGMFRTVGQLYK |
| | | | EQLTKLMTTLRNTNPNFVRCIIPNHE |
| | | | KRAGKLDAHLVLEQLRCNGVLEGIR |
| | | | ICRQGFPNRIVFQEFRQRYEILAANAI |
| | | | PKGFMDGKQACILMIKALELDPNLY |
| | | | RIGQSKIFFRTGVLAHLEEERDLKITD |
| | | | VIIAFQAQCRGYLARKAFAKRQQQL |
| | | | TAMKVIQRNCAAYLKLRNWQWWR |
| | | | LFTKVKPLLQVTRQEEEMQAKDEEL |
| | | | QRTKERQQKAEAELKELEQKHTQLC |
| | | | EEKNLLQEKLQAETELYAEAEEMRV |
| | | | RLAAKKQELEEILHEMEARIEEEEER |
| | | | SQQLQAEKKKMQQQMLDLEEQLEE |
| | | | EEAARQKLQLEKVTADGKIKKMED |
| | | | DILIMEDQNNKLTKERKLLEERVSDL |
| | | | TTNLAEEEEKAKNLTKLKNKHESMI |
| | | | SELEVRLKKEEKSRQELEKIKRKLEG |
| | | | ESSDLHEQIAELQAQIAELKAQLAKK |
| | | | EEELQAALARLEDETSQKNNALKKI |
| | | | RELESHISDLQEDLESEKAARNKAEK |
| | | | QKRDLSEELEALKTELEDTLDTTATQ |
| | | | QELRAKREQEVTVLKRALEEETRTH |
| | | | EAQVQEMRQKHTQAVEELTEQLEQF |
| | | | KRAKANLDKTKQTLEKDNADLANEI |
| | | | RSLSQAKQDVEHKKKKLEVQLQDL |
| | | | QSKYSDGERVRTELNEKVHKLQIEV |
| | | | ENVTSLLNEAESKNIKLTKDVATLGS |
| | | | QLQDTQELLQEETRQKLNVTTKLRQ |
| | | | LEDDKNSLQEQLDEEVEAKQNLERH |
| | | | ISTLTIQLSDSKKKLQEFTATVETMEE |
| | | | GKKKLQREIESLTQQFEEKAASYDKL |
| | | | EKTKNRLQQELDDLVVDLDNQRQL |
| | | | VSNLEKKQKKFDQMLAEEKNISSKY |
| | | | ADERDRAEAEAREKETKALSLARAL |
| | | | EEALEAKEELERTNKMLKAEMEDLV |
| | | | SSKDDVGKNVHELEKSKRTLEQQVE |
| | | | EMKTQLEELEDELQAAEDAKLRLEV |
| | | | NMQAMKSQFERDLQARDEQNEEKR |
| | | | RQLLKQLHEHETELEDERKQRALAA |
| | | | AAKKKLEVDVKDLESQVDSANKAR |
| | | | EEAIKQLRKLQAQMKDYQRDLDDA |
| | | | RAAREEIFATARENEKKAKNLEAELI |
| | | | QLQEDLAAAERARKQADLEKEEMA |
| | | | EELASANSGRTSLQDEKRRLEARIAQ |
| | | | LEEELDEEHSNIETMSDRMRKAVQQ |
| | | | AEQLNNELATERATAQKNENARQQL |
| | | | ERQNKELRSKLQEMEGAVKSKFKST |
| | | | IAALEAKIASLEEQLEQEAREKQAAA |
| | | | KTLRQKDKKLKDALLQVEDERKQA |
| | | | EQYKDQAEKGNLRLKQLKRQLEEAE |
| | | | EESQRINANRRKLQRELDEATESNDA |
| | | | LGREVAALKSKLRRGNEPVSFAPPRR |
| | | | SGGRRVIENATDGGEEEIDGRDGDFN |
| | | | GKASE |
| SEQ ID | P02607 | Myosin light | MCDFSEEQTAEFKEAFQLFDRTGDG |
| NO: 124 | (UniProtKB) | polypeptide | KILYSQCGDVMRALGQNPTNAEVM |
| | | 6/Gallus gallus | KVLGNPKSDEMNLKTLKFEQFLPMM |
| | | | QTIAKNKDQGCFEDYVEGLRVFDKE |
| | | | GNGTVMGAEIRHVLVTLGEKMTEEE |
| | | | VEQLVAGHEDSNGCINYEELVRMVL |
| | | | SG |
| SEQ ID | P02542 | Desmin/Gallus | QSYSSSQRVSSYRRTFGGGTSPVFPR |
| NO: 125 | (UniProtKB) | gallus | ASFGSRGSGSSVTSRVYQVSRTSAVP |
| | | | TLSTFRTTRVTPLRTYGSAYQGAGEL |
| | | | LDFSLADAMNQEFLQTRTNEKVELQ |
| | | | ELNDRFANYIEKVRFLEQQNALMVA |
| | | | EVNRLRGKQPTRVAEMYEEELRELR |
| | | | RQVDALTGQRARVEVERDNLLDNL |
| | | | QKLKQKLQEEIQLKQEAENNLAAFR |
| | | | ADVDAATLARIDLERRIESLQEEIAFL |
| | | | KKVHEEEIRELQAQLQEQHIQVEMDI |
| | | | SKPDLTAALRDIRAQYESIAAKNIAE |
| | | | AEEWYKSKVSDLTQAANKNNDALR |
| | | | QAKQEMLEYRHQIQSYTCEIDALKG |
| | | | TNDSLMRQMREMEERFAGEAGGYQ |
| | | | DTIARLEEEIRHLKDEMARHLREYQD |
| | | | LLNVKMALDVEIATYRKLLEGEENRI |
| | | | SIPMHQTFASALNFRETSPDQRGSEV |
| | | | HTKKTVMIKTIETRDGEVVSEATQQ |
| | | | QHEVL |
| SEQ ID | P19352-2 | Isoform 2 of | MEAIKKKMQMLKLDKENAIDRAEQ |
| NO: 126 | (UniProtKB) | Tropomyosin | AEADKKQAEDRCKQLEEEQQGLQK |
| | | beta | KLKGTEDEVEKYSESVKEAQEKLEQ |
| | | chain/Gallus | AEKKATDAEAEVASLNRRIQLVEEE |
| | | gallus | LDRAQERLATALQKLEEAEKAADES |
| | | | ERGMKVIENRAMKDEEKMELQEMQ |
| | | | LKEAKHIAEEADRKYEEVARKLVVL |
| | | | EGELERSEERAEVAESRVRQLEEELR |
| | | | TMDQSLKSLIASEEEYSTKEDKYEEE |
| | | | IKLLGEKLKEAETRAEFAERSVAKLE |
| | | | KTIDDLEESLASAKEENVGIHQVLDQ |
| | | | TLLELNNL |
| SEQ ID | Q2QLE2 | Caveolin-2/Sus | MGLETEKADVQLFMDDDSYSRHSG |
| NO: 127 | (UniProtKB) | scrofa | VDYADPKKFVDPGTDRDPHRLNSNL |
| | | | KVGFEDVIAEPVSTHSFDKVWICSHA |
| | | | LFEISKYVIYKFLTVFLAIPLAFAAGIL |
| | | | FATLSCLHIWIIIPFVKTCLMVLPSVQ |
| | | | TIWKSVTDVVIAPLCTSAGRSFSSVSL |
| | | | QLSHD |
| SEQ ID | Q90623 | Protein | MKMADAKQKRNEQLKRWIGSETDL |
| NO: 128 | (UniProtKB) | phosphatase 1 | EPPVVKRKKTKVKFDDGAVFLAACS |
| | | regulatory | SGDTEEVLRLLERGADINYANVDGL |
| | | subunit | TALHQACIDDNVDMVKFLVENGANI |
| | | 12A/Gallus | NQPDNEGWIPLHAAASCGYLDIAEY |
| | | gallus | LISQGAHVGAVNSEGDTPLDIAEEEA |
| | | | MEELLQNEVNRQGVDIEAARKEEER |
| | | | IMLRDARQWLNSGHINDVRHAKSGG |
| | | | TALHVAAAKGYTEVLKLLIQARYDV |
| | | | NIKDYDGWTPLHAAAHWGKEEACR |
| | | | ILVENLCDMEAVNKVGQTAFDVADE |
| | | | DILGYLEELQKKQNLLHSEKREKKSP |
| | | | LIESTANLDNNQTQKTFKNKETLIME |
| | | | QEKNASSIESLEHEKADEEEEGKKDE |
| | | | SSCSSEEEEDDDSESEAETDKAKTLA |
| | | | NANTTSTQSASMTAPSVAGGQGTPT |
| | | | SPLKKFPTSTTKVSPKEEERKDESPAS |
| | | | WRLGLRKTGSYGALAEITASKEAQK |
| | | | EKDSAGVIRSASSPRLSSSLDNKEKE |
| | | | KDGKGTRLAYVAPTIPRRLASTSDID |
| | | | EKENRDSSASSIRSGSSYARRKWEED |
| | | | VKKNSLNEGPTSLNTSYQRSGSFGRR |
| | | | QDDLVSSNVPSTASTVTSSAGLQKTL |
| | | | PASANTTTKSTTGSTSAGVQSSTSNR |
| | | | LWAEDSTEKEKDSVPTAVTVPVAPS |
| | | | VVNAAATTTAMTTATSGTVSSTSEV |
| | | | RERRRSYLTPVRDEESESQRKARSRQ |
| | | | ARQSRRSTQGVTLTDLQEAEKTIGRS |
| | | | RSTRTREQENEEKEKEEKEKQDKEK |
| | | | QEEKKESETKDDDYRQRYSRTVEEP |
| | | | YHRYRPTSTSTSTSSTSSLSTSTSSLSS |
| | | | SSQLNRPNSLIGITSAYSRSGTKESER |
| | | | EGGKKEEEKEEDKSQPKSIRERRRPR |
| | | | EKRRSTGVSFWTQDSDENEQEHQSD |
| | | | SEEGTNKKETQSDSLSRYDTGSLSVS |
| | | | SGDRYDSAQGRSGSQSYLEDRKPYC |
| | | | SRLEKEDSTDFKKLYEQILAENEKLK |
| | | | AQLHDTNMELTDLKLQLEKTTQRQE |
| | | | RFADRSLLEMEKRVSGKSQYLLGGK |
| | | | KSSRKKDI |
| SEQ ID | P26932-2 | Isoform Beta of | MSNANFNRGPAYGLSAEVKNKLAQ |
| NO: 129 | (UniProtKB) | Calponin- | KYDPQTERQLRVWIEGATGRRIGDN |
| | | 1/Gallus gallus | FMDGLKDGVILCELINKLQPGSVQK |
| | | | VNDPVQNWHKLENIGNFLRAIKHYG |
| | | | VKPHDIFEANDLFENTNHTQVQSTLI |
| | | | ALASQAKTKGNNVGLGVKYAEKQQ |
| | | | RRFQPEKLREGRNIIGLQMGTNKFAS |
| | | | QQGMTAYGTRRHLYDPKLGTDQPL |
| | | | DQATISLQMGTNKGASQGMTVYGLP |
| | | | RQVYDPKYCDAPGLLGEDGLNHSFY |
| | | | NSQ |
| SEQ ID | Q7YRL2 | Calponin-1/Ovis | MSSAHFNRGPAYGLSAEVKNKLAQ |
| NO: 130 | (UniProtKB) | aries | KYDHQREQELREWIEGVTGRRIGNN |
| | | | FMDGLKDGIILCEFINKLQPGSVKKV |
| | | | NESTQNWHQLENIGNFIKAITKYGVK |
| | | | PHDIFEANDLFENTNHTQVQSTLLAL |
| | | | ASMAKTKGNKVNVGVKYAEKQERK |
| | | | FEPEKLREGRNIIGLQMGTNKFASQQ |
| | | | GMTAYGTRRHLYDPKLGTDQPLDQ |
| | | | ATISLQMGTNKGASQAGMTAPGTKR |
| | | | QIFEPGLGMEHCDTLNVSLQMGSNK |
| | | | GASQRGMTVYGLPRQVYDPKYCLTP |
| | | | EYPELGEPAHNHHPHNYYNSA |
| SEQ ID | A0A212D0J2 | Calponin/Cervus | MSSTQFNKGPSYGLSAEVKNRLQSK |
| NO: 131 | (UniProtKB) | elaphus | YDPQKEAELRSWIEGLTGLSIGPDFQ |
| | | hippelaphus | KGLKDGIILCTLMNKLQPGSIPKINRS |
| | | | MQNWHQLENLSNFIKAMAKTKGLQ |
| | | | SGVDIGLKYSEKQERNFDDATMKAG |
| | | | QCVIGLQVGMTAPGTRRHIYDTKLG |
| | | | TDKCDNSSMSLQMGYTQGANQSGQ |
| | | | VFGLGRQIYDPKYCPQGPVADGAPA |
| | | | AAGDGPGPGEPSECPPYYQEEAGY |
| SEQ ID | Q5ZKU6 | Calponin/Gallus | MSSSQFNKGPSYGLSAEVKNRLAQK |
| NO: 132 | (UniProtKB) | gallus | YDPQKEAELRTWIESVTGRQIGADFQ |
| | | | KGLKDGVILCELMNKLQPNSVRKIN |
| | | | RSALNWHQLENLSNFIKAMVSYGM |
| | | | NPVDLFEANDLFESGNLTQVQVSLL |
| | | | ALAGMAKTKGLQSGVDIGVKYSER |
| | | | QQRNFDEAKMKAGQCVIGLQMGTN |
| | | | KCASQSGMTAYGTRRHLYDPKNQIL |
| | | | PPMDHSTISLQMGTNKCASQVGMTA |
| | | | PGTRRHIYDAKMGLEKCDNSSMSLQ |
| | | | MGSNQGANQSGQVFGLGRQIYDPK |
| | | | YCPQGTPGDAANAAGEPGADPPGYH |
| | | | YYHQEESC |
| SEQ ID | E1BSX2 | Calponin/Gallus | MTHFNKGPSYGLSAEVKNKIALKYD |
| NO: 133 | (UniProtKB) | gallus | PQIEEDLRNWIEEVTGLSIGANFQLG |
| | | | LKDGIILCELINKLQPGSVKKINQSKL |
| | | | NWHQLENIGNFIKAIQVYGMKPHDIF |
| | | | EANDLFENGNMTQVQTTLVALAGL |
| | | | AKTKGFHTTIDIGVKYAEKQARSFD |
| | | | AGKLKAGQSVIGLQMGTNKCASQA |
| | | | GMTAYGTRRHLYDPKMQTDKPFDQ |
| | | | TTISLQMGTNKGASQAGMLAPGTRR |
| | | | DIYDQKHILQPVDNSTISLQMGTNKV |
| | | | ASQKGMSVYGLGRQVYDPKYCAAP |
| | | | TEPVIHNGSQGTGTNGSEISDSDYQA |
| | | | EYPDDYHGEYQDDYQRDYHGQYSD |
| | | | QGIDY |
| SEQ ID | P19966 | Transgelin/ | MANKGPAYGMSRDVQSKIEKKYDD |
| NO: 134 | (UniProtKB) | Gallus gallus | ELEDRLVEWIVAQCGSSVGRPDRGR |
| | | | LGFQVWLKNGIVLSQLVNSLYPDGS |
| | | | KPVKIPDSPPTMVFKQMEQIAQFLKA |
| | | | AEDYGVVKTDMFQTVDLFEAKDMA |
| | | | AVQRTLVALGSLAVTKNDGHYHGD |
| | | | PNWFMKKAQEHKREFSESQLKEGK |
| | | | NIIGLQMGTNKGASQAGMSYGRPRQ |
| | | | IIS |
| SEQ ID | A0A1L1RTM1 | Caldesmon/ | RLSYQRNDDDEEEAARERRRRARQE |
| NO: 135 | (UniProtKB) | Gallus gallus | RLRQKEEGDVSGEVTEKSEVNAQNS |
| | | | VAEEETKRSTDDEAALLERLARREE |
| | | | RRQKRLQEALERQKEFDPTITDGSLS |
| | | | VPSRREVNNVEENETTGKEEKVETR |
| | | | QGRCEIEETETVTKSYQRNNWRQDG |
| | | | EEEGKKEEKDSEEEKPKEVPTEENQV |
| | | | DVAVEKSTDKEEVVETKTLAVNAEN |
| | | | DTNAMLEGEQSITDAADKEKEEAEK |
| | | | EREKLEAEEKERLKAEEEKKAAEEK |
| | | | QKAEEEKKAAEERERAKAEEEKRAA |
| | | | EERERAKAEEERKAAEERERAKAEE |
| | | | ERKAAEERAKAEEERKAAEERAKAE |
| | | | EERKAAEERAKAEKERKAAEERERA |
| | | | KAEEEKRAAEEKARLEAEKLKEKKK |
| | | | MEEKKAQEEKAQANLLRKQEEDKE |
| | | | AKVEAKKESLPEKLQPTSKKDQVKD |
| | | | NKDKEKAPKEEMKSVWDRKRGVPE |
| | | | QKAQNGERELTTPKLKSTENAFGRS |
| | | | NLKGAANAEAGSEKLKEKQQEAAV |
| | | | ELDELKKRREERRKILEEEEQKKKQE |
| | | | EAERKIREEEEKKRMKEEIERRRAEA |
| | | | AEKRQKVPEDGVSEEKKPFKCFSPK |
| | | | GSSLKIEERAEFLNKSAQKSGMKPAH |
| | | | TTAVVSKIDSRLEQYTSAVVGNKAA |
| | | | KPAKPAASDLPVPAEGVRNIKSMWE |
| | | | KGNVFSSPGGTGTPNKETAGLKVGV |
| | | | SSRINEWLTKTPEGNKSPAPKPSDLR |
| | | | PGDVSGKRNLWEKQSVEKPAASSSK |
| | | | VTATGKKSETNGLRQFEKEP |
| SEQ ID | E1C2S1 | Talin-1/Gallus | MVALSLKISIGNVVKTMQFEPSTMV |
| NO: 136 | (UniProtKB) | gallus | YDACRMIRERVPEAQMGQPNDFGLF |
| | | | LSDEDPKKGIWLEAGKALDYYMLR |
| | | | NGDTMEYKKKQRPLKIRMLDGTVK |
| | | | TVMVDDSKTVTDMLMTICARIGITN |
| | | | YDEYSLVREIMEEKKEEVTGTLKKD |
| | | | KTLLRDEKKMEKLKQKLHTDDELN |
| | | | WLDHGRTLREQGIDDNETLLLRRKF |
| | | | FYSDQNVDSRDPVQLNLLYVQARDD |
| | | | ILNGSHPVSFDKACEFAGYQCQIQFG |
| | | | PHNEQKHKPGFLELKDFLPKEYIKQK |
| | | | GERKIFMAHKNCGNMSEIEAKVRYV |
| | | | KLARSLKTYGVSFFLVKEKMKGKNK |
| | | | LVPRLLGITKECVMRVDEKTKEVIQE |
| | | | WSLTNIKRWAASPKSFTLDFGDYQD |
| | | | GYYSVQTTEGEQIAQLIAGYIDIILKK |
| | | | KKSKDHFGLEGDEESTMLEDSVSPK |
| | | | KSTVLQQQFNRVGKAELGSVALPAI |
| | | | MRTGAGGPENFQVGTMPQAQMQIT |
| | | | SGQMHRGHMPPLTSAQQALTGTINS |
| | | | SMQAVNAAQATLDDFETLPPLGQDA |
| | | | ASKAWRKNKMDESKHEIHSQVDAIT |
| | | | AGTASVVNLTAGDPADTDYTAVGC |
| | | | AVTTISSNLTEMSKGVKLLAALMED |
| | | | EGGNGRQLLQAAKNLASAVSDLLKT |
| | | | AQPASAEPRQNLLQAAGLVGQTSGE |
| | | | LLQQIGESDTDPRFQDMLMQLAKAV |
| | | | ASAAAALVLKAKNVAQKTEDSALQ |
| | | | TQVIAAATQCALSTSQLVACTKVVA |
| | | | PTISSPVCQEQLIEAGKLVAKSAEGC |
| | | | VEASKAATNDDQLLKQVGVAATAV |
| | | | TQALNDLLQHIKQHATGGQPIGRYD |
| | | | QATDTILNVTENIFSSMGDAGEMVR |
| | | | QARILAQATSDLVNAIKADAEGETD |
| | | | LENSRKLLSAAKILADATAKMVEAA |
| | | | KGAAAHPDSEEQQQRLREAAEGLR |
| | | | MATNAAAQNAIKKKLVHKLEHAAK |
| | | | QAAASATQTIAAAQHAAASNKNPAA |
| | | | QQQLVQSCKVVADQIPMLVQGVRG |
| | | | SQSQPDSPSAQLALIAASQNFLQPGG |
| | | | KMVAAAKATVPTITDQASAMQLSQ |
| | | | CAKNLAAALAELRTAAQKAQEACG |
| | | | PLEIDSALGLVQSLERDLKEAKAAAR |
| | | | DGKLKPLPGETMEKCAQDLGNSTKA |
| | | | VTSAIAHLLGEVAQGNENYTGIAAR |
| | | | EVAQALRSLSQAARGVAANSSDPQV |
| | | | QNAMLECASDVMDKANNLIEEARK |
| | | | AVAKPGDPDSQQRLVQVAKAVSQA |
| | | | LNRCVNCLPGQRDVDAAIRMVGEAS |
| | | | KRLLSDSFPPSNKTFQEAQSQLNRAA |
| | | | AGLNQSANELVQASRGTPQDLAKSS |
| | | | GKFGQDFNEFLQAGVEMASLSPTKE |
| | | | DQAQVVSNLKSISMSSSKLLLAAKA |
| | | | LSADPTSPNLKSQLAAAARAVTDSIN |
| | | | QLITMCTQQAPGQKECDNALRELET |
| | | | VKELLENPTQTVNDMSYFSCLDSVM |
| | | | ENSKVLGESMAGISQNAKNSKLPEF |
| | | | GESISAASKALCGLTEAAAQAAYLV |
| | | | GVSDPNSQAGQQGLVDPTQFARANQ |
| | | | AIQMACQNLVDPACTQSQVLSAATI |
| | | | VAKHTSALCNTCRLASSRTANPVAK |
| | | | RQFVQSAKEVANSTANLVKTIKALD |
| | | | GAFNEENRERCRAATAPLIEAVDNLT |
| | | | AFASNPEFATVPAQISPEGRRAMEPI |
| | | | VTSAKTMLESSAGLIQTARSLAVNPK |
| | | | DPPQWSVLAGHSRTVSDSIKKLITNM |
| | | | RDKAPGQRECDEAIDVLNRCMREVD |
| | | | QASLAAISQQLAPREGISQEALHNQM |
| | | | ITAVQEINNLIEPVASAARAEASQLG |
| | | | HKVSQMAQYFEPLILAAIGAASKTPN |
| | | | HQQQMNLLDQTKTLAESALQMLYT |
| | | | AKEAGGNPKQAAHTQEALEEAVQM |
| | | | MKEAVEDLTTTLNEAASAAGVVGG |
| | | | MVDSITQAINQLDEGPMGEPEGTFV |
| | | | DYQTTMVKTAKAIAVTVQEMVTKS |
| | | | TTNPDELGILANQLTNDYGQLAQQA |
| | | | KPAALTAENEEIGSHIKRRVQELGHG |
| | | | CAALVTKAGALQCSPSDAYTKKELI |
| | | | ESARKVSEKVSHVLAALQAGNRGTQ |
| | | | ACITAASAVSGIIADLDTTIMFATAGT |
| | | | LNRENSETFADHREGILKTAKALVED |
| | | | TKVLVQNATASQEKLAQAAQSSVST |
| | | | ITRLAEVVKLGAASLGSEDPETQVVL |
| | | | INAVKDVAKALGDLIGATKAAAGKA |
| | | | GDDPAVYQLKNSAKVMVTNVTSLL |
| | | | KTVKAVEDEATKGTRALEATIEHIRQ |
| | | | ELAVFSSPVPPAQVSTPEDFIRMTKGI |
| | | | TMATAKAVAAGNSCRQEDVIATAN |
| | | | LSRRAIADMLRACKEAAYHPEVSAD |
| | | | VRQRALRFGKECADGYLELLEHVLV |
| | | | ILQKPTHELKQQLAGYSKRVASSVTE |
| | | | LIQAAEAMKGTEWVDPEDPTVIAEN |
| | | | ELLGAAAAIEAAAKKLEQLKPRAKP |
| | | | KQADESLDFEEQILEAAKSIAAATSA |
| | | | LVKAASAAQRELVAQGKVGVIPANA |
| | | | VDDGQWSQGLISAARMVAAATNNL |
| | | | CEAANAAVQGHASEEKLISSAKQVA |
| | | | ASTAQLLVACKVKADHDSEAMKRL |
| | | | QAAGNAVKRASDNLVKAAQKAAAF |
| | | | QDHDETVVVKEKMVGGIAQIIAAQE |
| | | | EMLRKERELEEARKKLAMIRQQQYK |
| | | | FLPTELRDEEQN |
| SEQ ID | E1BXG1 | Profilin/Gallus | MNCWNYYTDCILSDKYIDDVAIVGL |
| NO: 137 | (UniProtKB) | gallus | SDNKYVWAAKPGGLLSAVSPREVDL |
| | | | ITGQDRITFLTAGISIAGKKCIVIRDSL |
| | | | LVEGDNVMDIRSRGGDSRSICIGKTP |
| | | | KALIFLMGNRGVHGGVLNLKIHDMI |
| | | | AGMTL |
| SEQ ID | E1C9A2 | Profilin/Gallus | MIQLQALLKESLIRTKHVENAAAIGI |
| NO: 138 | (UniProtKB) | gallus | NEREVCASTSGFYVPPENAINLIYAF |
| | | | YKNLLQVRKEGLYFRQKHYECVRA |
| | | | DEHSIYLKNAEGGLIVVKTNALILIAT |
| | | | YRVGMYPSVCVEAVEKLGKTNTCT |
| | | | CMAACQRFIGWLCSCKELQKCV |
| SEQ ID | 093256 | Keratin, type 1 | MATYSFRQTTSSVAGGPCGRSLRLG |
| NO: 139 | (UniProtKB) | cytoskeletal | GGSFRAPSIHGGSGGRGVSVSSARFV |
| | | 19/Gallus gallus | SSGLGSGLGGGYGGAFSSSFSAGFGG |
| | | | GYGGGLGSGDGLLSGNEKTTMQNL |
| | | | NDRLASYLDKVRALEEANSDLETKI |
| | | | REWYLKQGPGPARDYSPYYKAIEDL |
| | | | RDQILAATIDNSKVVLQIDNARLAAD |
| | | | DFKTKFETEQALRMSVEADINGLRR |
| | | | VLDELTLARTDLELQIENLKEELAYL |
| | | | KKNHEEEMSALGGQVASQVSVEVD |
| | | | SAPGIDLSKILADMRDQYEHMAEKN |
| | | | RKDAEAWFHSKTEELNRELAVNTEQ |
| | | | LQSSKSEVTDLRRTLQGLEIELQSQLS |
| | | | MKGALESTLADTEGRYGAQLAQIQD |
| | | | MIGSIEAQLAELRADMERQNSEYKM |
| | | | LMDIKTRLEQEIATYRQLLEGQESQL |
| | | | FGSLSGSPDKRDKPADGK |

Skeletal and cardiac muscle tissue

| | | | |
|---|---|---|---|
| SEQ ID | B5X7T1 | Troponin C, | MDDVYKAAVENLTEEQKNEFKAAF |
| NO: 140 | (UniProtKB) | slow skeletal | DIACQGAEDGCISTKELGKVMRMLG |
| | | and cardiac | QNPTPEELQEMIDEVDEDGSGTVDF |
| | | muscles/Salmo | DEFLVMMVRCMKEESKGKSEEELAE |
| | | salar | LFRMFDKNGDGYIDLEELKTMLEST |
| | | | GEAITEDDIEELMKDGDKNNDGKID |
| | | | YDEFLEFMKGVE |
| SEQ ID | P09860 | Troponin C, | MDDIYKAAVEQLTEEQKNEFKAAFD |
| NO: 141 | (UniProtKB) | slow skeletal | IFVLGAEDGCISTKELGKVMRMLGQ |
| | | and cardiac | NPTPEELQEMIDEVDEDGSGTVDFDE |
| | | muscles/Gallus | FLVMMVRCMKDDSKGKTEEELSDL |
| | | gallus | FRMFDKNADGYIDLEELKIMLQATG |
| | | | ETITEDDIEELMKDGDKNNDGRIDYD |
| | | | EFLEFMKGVE |
| SEQ ID | P63315 | Troponin C, | MDDIYKAAVEQLTEEQKNEFKAAFD |
| NO: 142 | (UniProtKB) | slow skeletal | IFVLGAEDGCISTKELGKVMRMLGQ |
| | | and cardiac | NPTPEELQEMIDEVDEDGSGTVDFDE |
| | | muscles/Bos | FLVMMVRCMKDDSKGKSEEELSDLF |
| | | taurus | RMFDKNADGYIDLEELKIMLQATGE |
| | | | TITEDDIEELMKDGDKNNDGRIDYDE |
| | | | FLEFMKGVE |
| SEQ ID | P14315-2 | Isoform 2 of F- | MSDQQLDCALDLMRRLPPQQIEKNL |
| NO: 143 | (UniProtKB) | actin-capping | SDLIDLVPSLCEDLLSSVDQPLKIARD |
| | | protein subunit | KVVGKDYLLCDYNRDGDSYRSPWS |
| | | beta isoforms 1 | NKYDPPLEDGAMPSARLRKLEVEAN |
| | | and 2/Gallus | NAFDQYRDLYFEGGVSSVYLWDLD |
| | | gallus | HGFAGVILIKKAGDGSKKIKGCWDSI |
| | | | HVVEVQEKSSGRTAHYKLTSTVML |
| | | | WLQTNKTGSGTMNLGGSLTRQMEK |
| | | | DETVSDSSPHIANIGRLVEDMENKIR |
| | | | STLNEIYFGKTKDIVNGLRSVQTFAD |
| | | | KSKQEALKNDLVEALKRKQQS |
| SEQ ID | E1BMP3 | Myosin light | MSGAPKESLGPQGLPGLGKACLTTM |
| NO: 144 | (UniProtKB) | chain kinase | DKKLNMLNEKVDKLLHFQEDVTEK |
| | | 3/Bos taurus | LQCVYRGMGHLEQGLHRLEASRGL |
| | | | GPAGADRSPPSDAQAGWPEVLELVR |
| | | | AGRQDAAQQGARLEALFRMVMAV |
| | | | DKAIALVGAVLQNSKVVDFIMQGSV |
| | | | PWRKGSLADNKEQVEEKEAKPKHTL |
| | | | STRGVQAELRGPWEESQKADLPEGT |
| | | | GSDLPTQTEAPPEQRDGISGPTQVRP |
| | | | EVEVQAPRASSKNPGIGLELSVVSER |
| | | | VSEAPTGQEAALSAGRGTSPSRPDPR |
| | | | PSVEGMRLTPAPPAQAKAAHGGGET |
| | | | PPRISIHVQETDTPGELLVTRGGSLRT |
| | | | SPPAETPAAVPPGEQDPPGPRCCPQA |
| | | | PGTESGKPILRGASVRKRSCDEGAKA |
| | | | KEKQGPGSELTMAPSRARRDKGADS |
| | | | GASGPQQDMNPGAGNPDPGKDCTA |
| | | | GGVGSAEAGSRTPPGAEASSLVLDD |
| | | | SPAPPAPFEHRVVSVRETSTSAGYTV |
| | | | CQHEVLGGGRFGQVHRCTEKATGLS |
| | | | LAAKIIKVKSAKDREDVKNEINIMNQ |
| | | | LSHVNLIQLYDAFESKNSFTLVMEYV |
| | | | DGGELFDRITEEKYHLTELDVVLFTK |
| | | | QICEGVHYLHQHYVLHLDLKPENILC |
| | | | VNQTGHQIKIIDFGLARRYKPREKLK |
| | | | VNFGTPEFLAPEVVNYEFVSFPTDM |
| | | | WSVGVITYMLLSGLSPFLGETDAET |
| | | | MNFIVNCNWDFDADTFEGLSEEAKD |
| | | | FVSRLLVKEKSCRMSATQCLKHEWL |
| | | | NNLPAKASKSKVHLKSQLLLQKYM |
| | | | AQRKWKKHFYVVTAANRLRKFPTC |
| | | | P |
| SEQ ID | B5X8Q3 | Troponin | MNDIYKAAVEQLTDEQKNEFKAAFD |
| NO: 145 | (UniProtKB) | C/Salmo salar | IFVQDAEDGCISTKELGKVMRMLGQ |
| | | | NPTPEELQEMIDEVDEDGSGTVDFDE |
| | | | FLVMMVRCMKDDSKGKTEEELADL |
| | | | FRMFDKNADGYIDLEELKVMLEATG |
| | | | EAITEDDIEELMKDGDKNNDGKIDY |
| | | | DEFLEFMKGVE |
| SEQ ID | A4GR69 | Telethonin/Sus | MATSELSCQVSEENCERREAFWAEW |
| NO: 146 | (UniProtKB) | scrofa | KDLTLSTRPEEGCSLHEEDAERRETY |
| | | | HQQGQCQALVQRSPWLVMRMGILG |
| | | | RGLQEYQLPYQRVLPLPIFTPAKVGA |
| | | | AKEEREETPIQLRELLALETALGGQC |
| | | | LDRQDVAEITKQLPPVVPVSKPGALR |
| | | | RSLSRSMSQEAQRG |
| SEQ ID | P04268 | Tropomyosin | MDAIKKKMQMLKLDKENALDRAEQ |
| NO: 147 | (UniProtKB) | alpha-1 | AEADKKAAEERSKQLEDELVALQKK |
| | | chain/Gallus | LKGTEDELDKYSESLKDAQEKLELA |
| | | gallus | DKKATDAESEVASLNRRIQLVEEELD |
| | | | RAQERLATALQKLEEAEKAADESER |
| | | | GMKVIENRAQKDEEKMEIQEIQLKE |
| | | | AKHIAEEADRKYEEVARKLVIIEGDL |
| | | | ERAEERAELSESKCAELEEELKTVTN |
| | | | NLKSLEAQAEKYSQKEDKYEEEIKV |
| | | | LTDKLKEAETRAEFAERSVTKLEKSI |
| | | | DDLEDELYAQKLKYKAISEELDHAL |
| | | | NDMTSI |
| SEQ ID | Q05706 | Beta- | MEAIKKKMQMLKLDKENAIDRAEQ |
| NO: 148 | (UniProtKB) | tropomyosin/ | AEADKKQAEDRCKQLEEEQQGLQK |
| | | Gallus gallus | KLKGTEDEVEKYSESVKEAQEKLEQ |
| | | | AEKKATDAEAEVASLNRRIQLVEEE |
| | | | LDRAQERLATALQKLEEAEKAADES |
| | | | ERGMKVIENRAMKDEEKMELQEMQ |
| | | | LKEAKHIAEEADRKYEEVARKLVVL |
| | | | EGELERSEERAEVAESKCGDLEEELK |
| | | | IVTNNLKSLEAQADKYSTKEDKYEE |
| | | | EIKLLGEKLKEAETRAEFAERSVAKL |
| | | | EKTIDDLEERSRQEAEKNRVLTNELR |
| | | | VILTELNN |
| SEQ ID | Q2KI43 | Caveolin-3/Bos | MMAEEHTDLEAQIVKDIHFKEIDLV |
| NO: 149 | (UniProtKB) | taurus | NRDPKNINEDIVKVDFEDVIAEPVGT |
| | | | YSFDGVWKVSYTTFTVSKYWCYRL |
| | | | LSTLLGVPLALLWGFLFACISFCHIW |
| | | | AVVPCIKSYLIEIQCISHIYSLCIRTFC |
| | | | NPLFAALGQVCSNIKVMLRKEV |
| SEQ ID | Q02173 | M-protein, | MSSVAVPFYQRRHKHFDQSYRNIQT |
| NO: 150 | (UniProtKB) | striated | RYVLEEYAARKAASRQAAHYESTGL |
| | | muscle/Gallus | GKTTCRLCARRARSLAHEAMQESRK |
| | | gallus | RTHEQKSHASDEKRIKFASELSSLER |
| | | | EIHMARHHAREQLDRLAIQRMVEEN |
| | | | MALERHVVEEKISRAPEILVRLRSHT |
| | | | VWEKMSVRLCFTVQGFPSPVVQWY |
| | | | KNEELITPASDPAKYSVENKYGVHV |
| | | | LHINRADFDDSATYSAVATNIHGQAS |
| | | | TNCAVVVRRFRESEEPHPAGIMPFHL |
| | | | PLSYDVCFTHFDVQFLEKFGVTFATE |
| | | | GETLTLKCSVLVTPELKRLRPRAEW |
| | | | YRDDVLIKDSKWTKLYFGEGQAALS |
| | | | FTHLNKDDEGLYTLRMVTKGGVNE |
| | | | CSAFLFVRDADALIAGAPGAPMDVK |
| | | | CHDANRDYVIVTWKPPNTTSQNPVI |
| | | | GYFVDKCEVGLENWVQCNDAPVKI |
| | | | CKYPVTGLYEGRSYIFRVRAVNSAGI |
| | | | SRPSRVSEPVAALDPVDLERTQTVHV |
| | | | DEGRKIVISKDDLEGDIQIPGPPTNVH |
| | | | ASEISKTYVVLSWDPPVPRGREPLTY |
| | | | FIEKSMVGSGSWQRVNAQVAVKSPR |
| | | | YAVFDLAEGKPYVFRVLSANKHGIS |
| | | | DPSEITEPIQPQDIVVVPSAPGRVVAT |
| | | | RNTKTSVVVQWDKPKHEENLYGYYI |
| | | | DYSVVGSNQWEPANHKPINYNRFVV |
| | | | HGLETGEQYIFRVKAVNAVGFSENS |
| | | | QESEAIKVQAALTCPSYPHGITLLNC |
| | | | DGHSMTLGWKAPKYSGGSPILGYYI |
| | | | DKREANHKNWHEVNSSVISRTIYTV |
| | | | EDLTEDAFYEFKIAAANVVGIGHPSD |
| | | | PSEHFKCKAWTMPEPGPAYDLTVCE |
| | | | VRNTSLVLLWKAPVYEGKSPITGYL |
| | | | VDYKEVDTEDWITANEKPTSHRYFK |
| | | | VTDLHQGHTYVFKVRAVNDAGVGK |
| | | | SSEISEPVFVEASPGTKEIFSGVDEEG |
| | | | NIYLGFECKEATDASHFLWGKSYEEI |
| | | | EDSDKFKIETKGDHSKLYFKHPDKSD |
| | | | LGTYCISVSDTDGVSSSFVLDEEELE |
| | | | RLMTLSNEIKNPTIPLKSELAYEVLD |
| | | | KGEVRFWIQAESLSPNSTYRFVINDK |
| | | | EVENGDRHKISCDHSNGIIEMVMDK |
| | | | FTIDNEGTYTVQIQDGKAKNQSSLVL |
| | | | IGDAFKAILAESELQRKEFLRKQGPH |
| | | | FSEFLYWEVTEECEVLLACKIANTKK |
| | | | ETVFKWYRNGSGIDVDEAPDLQKGE |
| | | | CHLTVPKLSRKDEGVYKATLSDDRG |
| | | | HDVSTLELSGKVYNDIILALSRVSGK |
| | | | TASPLKILCTEEGIRLQCFLKYYNEE |
| | | | MKVTWSHRESKISSGEKMKIGGGED |
| | | | VAWLQITEPTEKDKGNYTFEIFSDKE |
| | | | SFKRTLDLSGQAFDDALTEFQRLKA |
| | | | AAFAEKNRGKVIGGLPDVVTIMDGK |
| | | | TLNLTCTVFGNPDPEVVWFKNDKAL |
| | | | ELNEHYLVSLEQGKYASLTIKGVTSE |
| | | | DSGKYSIYVKNKYGGETVDVTVSVY |
| | | | RHGEKIPEVNQGQLAKPRLIPPSSST |
| SEQ ID | E1BE25 | Filamin C/Bos | MMNNSGYSEAPGFGLGDEVDDMPS |
| NO: 151 | (UniProtKB) | taurus | TEKDLAEDAPWKKIQQNTFTRWCNE |
| | | | HLKCVGKRLTDLQRDLSDGLRLIAL |
| | | | LEVLSQKRMYRKFHPRPNFRQMKLE |
| | | | NVSVALEFLEREHIKLVSIDSKAIVDG |
| | | | NLKLILGLIWTLILHYSISMPMWEDE |
| | | | DDEDARKQTPKQRLLGWIQNKVPQL |
| | | | PITNFNRDWQDGKALGALVDNCAPG |
| | | | LCPDWEAWDPNQPVENAREAMQQA |
| | | | DDWLGVPQVIAPEEIVDPNVDEHSV |
| | | | MTYLSQFPKAKLKPGAPVRSKQLNP |
| | | | KKAIAYGPGIEPQGNTVLQPAHFTVQ |
| | | | TVDAGIGEVLVYIEDPEGHTEEAKVV |
| | | | PNNDKNRTYAVSYVPKVAGLHKVT |
| | | | VLFAGQNIERSPFEVNVGMALGDAN |
| | | | KVSARGPGLEPVGNVANKPTYFDIY |
| | | | TAGAGTGDVAVVIVDPQGRRDTVEV |
| | | | ALEDKGDSTFRCTYRPVMEGPHTVH |
| | | | VAFAGAPITRSPFPVHVAEACNPNAC |
| | | | RASGRGLQPKGVRVKEVADFKVFTK |
| | | | GAGSGELKVTVKGPRGTEEPVKVRE |
| | | | AGDGVFECEYYPVVPGKYVVTITWG |
| | | | GYAIPRSPFEVQVSPEAGIQKVRAWG |
| | | | PGLETGQVGKSADFVVEAIGTEVGT |
| | | | LGFSIEGPSQAKIECDDKGDGSCDVR |
| | | | YWPTEPGEYAVHVICDDEDIRDSPFI |
| | | | AHIQPAPPDCFPDKVKAFGPGLEPTG |
| | | | CIVDKPAEFTIDARAAGKGDLKLYA |
| | | | QDADGCPIDIKVIPNGDGTFRCSYVP |
| | | | TKPIKHTIIVSWGGVNVPKSPFRVNV |
| | | | GEGSHPERVKVYGPGVEKTGLKANE |
| | | | PTYFTVDCSEAGQGDVSIGIKCAPGV |
| | | | VGPAEADIDFDIIKNDNDTFTVKYTP |
| | | | PGAGRYTIMVLFANQEIPASPFHIKV |
| | | | DPSHDASKVKAEGPGLNRTGVEVGK |
| | | | PTHFTVLTKGAGKAKLDVHFAGAA |
| | | | KGEAVRDFEIIDNHDYSYTVKYTAV |
| | | | QQGNMAVTVTYGGDPVPKSPFVVN |
| | | | VAPPLDLSKVKVQGLNSKVAVGQEQ |
| | | | AFSVNTRGAGGQGQLDVRMTSPSRR |
| | | | PIPCKLEPGGGAETQAVRYMPPEEGP |
| | | | YKVDITYDGHPVPGSPFAVEGVLPPD |
| | | | PSKVCAYGPGLKGGLVGTPAPFSIDT |
| | | | KGAGTGGLGLTVEGPCEAKIECQDN |
| | | | GDGSCAVSYLPTEPGEYTINILFAEA |
| | | | HIPGSPFKATIRPVFDPSKVRASGPGL |
| | | | ERGKAGEAATFTVDCSEAGEAELTIE |
| | | | ILSDAGVKAEVLIHNNADGTYHITYS |
| | | | PAFPGTYTITIKYGGHPVPKFPTRVH |
| | | | VQPAVDTSGVKVSGPGVEPHGVLRE |
| | | | VTTEFTVDARSLTATGGNHVTARVL |
| | | | NPSGAKTDTYVTDNGDGTYRVQYT |
| | | | AYEEGAHLVEVLYDDVAVPKSPFRV |
| | | | GVTEGCDPTRVRAFGPGLEGGLVNK |
| | | | ANRFTVETRGAGTGGLGLAIEGPSEA |
| | | | KMSCKDNKDGSCTVEYIPFTPGDYD |
| | | | VNITFGGRPIPGSPFRVPVKDVVDPG |
| | | | KVKCSGPGLGAGVRARVPQTFTVDC |
| | | | SQAGRAPLQVAVLGPTGVAEPVEVR |
| | | | DNGDGTHTVHYTPATDGPYTVAVK |
| | | | YADQEVPRSLSSPFKIKVLPAHDASK |
| | | | VRASGPGLNASGIPASLPVEFTIDAR |
| | | | DAGEGLLTVQILDPEGKPKKANIRDN |
| | | | GDGTYTVSYLPDMSGRYTITIKYGG |
| | | | DEIPYSPFRIHALPTGDASKCLVTVSI |
| | | | GGHGLGACLGPRIQIGEETVITVDAK |
| | | | AAGKGKVTCTVSTPDGAELDVDVV |
| | | | ENHDGTFDIYYTAPEPGKYVITIRFG |
| | | | GEHIPNSPFHVLACEAMPRVEEPPDV |
| | | | PQLHRPSAYPTHWATEEPVVPAEPM |
| | | | ESMLRPFNLVIPFTVQKGELTGEVRM |
| | | | PSGKTARPNITDNKDGTITVRYAPTE |
| | | | KGLHQMGIKYDGNHIPGSPLQFYVD |
| | | | AINSRHVSAYGPGLSHGMVNKPATF |
| | | | TIVTKDAGEGGLSLAVEGPSKAEITC |
| | | | KDNKDGTCTVSYLPTAPGDYSIIVRF |
| | | | DDKHIPGSPFTAKITGDDSMRTSQLN |
| | | | VGTSTDVSLKITESDLSQLTASIRAPS |
| | | | GNEEPCLLKRLPNRHIGISFTPKEVGE |
| | | | HVVSVRKSGKHVTNSPFKILVGPSEI |
| | | | GDASKVRVWGKGLSEGHTFQVAEFI |
| | | | VDTRNAGYGGLGLSIEGPSKVDINCE |
| | | | DMEDGTCKVTYCPTEPGTYIINIKFA |
| | | | DKHVPGSPFTVKVTGEGRMKESITR |
| | | | RRQAPSIATIGSTCDLNLKIPGNWFQ |
| | | | MVSAQERLTRTFTRSSHTYTRTERTE |
| | | | ISKTRGGETKREVRVEESTQVGGDPF |
| | | | PAVFGDFLGRERLGSFGSITRQQEGE |
| | | | ASSQDMTAQVTSPSGKTEAAEIVEGE |
| | | | DSAYSVRFVPQEMGPHTVTVKYRGQ |
| | | | HVPGSPFQFTVGPLGEGGAHKVRAG |
| | | | GTGLERGVAGVPAEFSIWTREAGAG |
| | | | GLSIAVEGPSKAEIAFEDRKDGSCGV |
| | | | SYVVQEPGDYEVSIKFNDEHIPDSPF |
| | | | VVPVASLSDDARRLTVTSLQETGLK |
| | | | VNQPASFAVQLNGARGVIDARVHTP |
| | | | SGAVEECYVSELDSDKHTIRFIPHEN |
| | | | GVHSIDVKFNGAHIPGSPFKIRVGEQ |
| | | | SQAGDPGLVSAYGPGLEGGTTGVSS |
| | | | EFIVNTLNAGSGALSVTIDGPSKVQL |
| | | | DCRECPEGHVVTYTPMAPGNYLIAIK |
| | | | YGGPQHIVGSPFKAKVTGPRLSGGHS |
| | | | LHETSTVLVETVTKSSSSRGSSYSSIP |
| | | | KFSSDASKVVTRGPGLSQAFVGQKN |
| | | | SFTVDCSKAGTNMMMVGVHGPKTP |
| | | | CEEVYVKHMGNRVYNVTYTVKEKG |
| | | | DYILIVKWGDESVPGSPFKVNVP |
| SEQ ID | Q5ZLY3 | Tropomodulin | MTLPFRKDLDKYKDLDEDDILGKLS |
| NO: 152 | (UniProtKB) | 3/Gallus gallus | EEELKQLETVLDDLDPENALLPAGFR |
| | | | QKDQTAKKASGPFDRERLLAYLEKQ |
| | | | ALEHKDREDYVPFTKEKKGKVFIPK |
| | | | QKPAQSYAEEKIALDPELEEALTSAT |
| | | | DTELCDLAAILGMSNLITNNQFCDIV |
| | | | GSSNGVGKDSFSNIVKGEKMLPVFD |
| | | | EPPNPTNVEETLQRIKDNDSRLVEVN |
| | | | LNNIKNIPIPTLKEFAKALETNTHVKN |
| | | | FSLAATRSNDPVAVALADMLRVNTK |
| | | | LKSLNIESNFITGVGILALVDALKDNE |
| | | | TLTEIKIDNQRQQLGTLAEVEIAKML |
| | | | EENTKILKFGYHFTQQGPRARAAAAI |
| | | | TKNNDLVRKRRVEGDGQ |
| SEQ ID | AAC14459.1 | Tropomodulin/ | MSYRKELEKYRDLDEDKILGALTEE |
| NO: 153 | (GenBank) | Gallus gallus | ELRKLENELEELDPDNALLPAGLRQR |
| | | | DQTQKPPTGPFKREELMAHLEQQAK |
| | | | DIKDREDLVPFTGEKRGKAWIPKQK |
| | | | PMDPVLESVTLEPELEEALANASDAE |
| | | | LCDIAAILGMHTLMSNQQYYEALGS |
| | | | STIVNKEGLNSVIKPTKYKPVPDEEP |
| | | | NSTDVEETLKRIQNNDPDLEEVNLN |
| | | | NIMNIPVPTLKALAEALKTNTYVKKF |
| | | | SIVGTRSNDPVAFALAEMLKVNNTL |
| | | | KSLNVESNFISGSGILALVEALQSNTS |
| | | | LIELRIDNQSQPLGNNVEMEIANMLE |
| | | | KNTTLLKFGYHFTQQGPRLRASNAM |
| | | | MNNNDLVRKRRLAELNGPIFPKCRT |
| | | | GV |
| SEQ ID | A0A287BJ41 | Tropomodulin | MSYRRELEKYRDLDEDEILGALTEEE |
| NO: 154 | (UniProtKB) | 1/Sus scrofa | LRTLENELDELDPDNALLPAGLRQK |
| | | | DQTTKAPTGPFKREELLDHLEKQAK |
| | | | EFKDREDLVPYTGEKRGKVWVPKQ |
| | | | KPMDPVLETVTLEPELEEALANASD |
| | | | AELCDIAAILGMHTLMSNQQYYQAL |
| | | | GSSSIVNKEGLNSVIKPTQYKPVPDE |
| | | | EPNATDVEETLERIKNNDPKLEEVNL |
| | | | NNIRNIPIPTLKAYAEALKENSYVKK |
| | | | FSIVGTRSNDPVAFALAEMLKVNKV |
| | | | LKTLNVESNFISGAGILRLVEALPYN |
| | | | TSLVELKIDNQSQPLGNKVEMEIVSM |
| | | | LEKNATLLKFGYHFTQQGPRLRASN |
| | | | AMMNNNDLVRKRRLADLTGPIIPKC |
| | | | RSGI |
| SEQ ID | F1NXA5 | Coronin/Gallus | MSRRVVRQSKFRHVFGQPVKADQM |
| NO: 155 | (UniProtKB) | gallus | YEDIRVSKVTWDSSFCAVNPKFVAII |
| | | | VEAGGGGAFMVLPLAKTGRVDKNH |
| | | | PLVTGHTAPVLDIDWCPHNDNVIAS |
| | | | ASEDTTVMVWQIPDYVPVRSITEPVV |
| | | | TLEGHSKRVGIICWHPTARNVLLSAG |
| | | | CDNLVILWNVGTGEMLLALEDMHT |
| | | | DLIYNVGWNRNGSLLVTTCKDKKV |
| | | | RVIDPRKQTVVAEITKPHDGARPIRAI |
| | | | FMADGKIFTTGFSKMSERQLGLWDL |
| | | | KNFEEPIALQEMDTSNGVLLPFYDPD |
| | | | TNIVYLCGKGDSSIRYFEITDEAPYV |
| | | | HYLNTYSSKEPQRGMGFMPKRGLD |
| | | | VSKCEIARFFKLHERKCEPIVMTVPR |
| | | | KSDLFQDDLYPDTPGPEPALEADEW |
| | | | LSGKDAEPILISLRDGYVPVKNRELK |
| | | | VVKKNILDSKPPPGPRRSHSTSNTDIS |
| | | | TPALDEVLEEIRVLKETVQAQEKRIS |
| | | | ALEHKLCQFTNGTD |
| SEQ ID | XP_015136760.1 | Nebulette | MYFSFMLAGLHRRKEFSLLFPPSIKM |
| NO: 156 | (NCBI) | isoform | RVSVTQEFTEDENENGEEERVFLKPV |
| | | X1/Gallus gallus | IEDRNMELARKCSEIISDVHYKEEFE |
| | | | KSKGKCIFVPDTPQLKHVKSVGAFIS |
| | | | EVKYKGAAKKDLSNSLYQQMPATID |
| | | | SAFAKELTQLQSKVLYKQKHDAEKG |
| | | | TSDYAHMKEPPDIKHAMEVNKYQS |
| | | | DVSYKRDVQDTHRYTEVLNRPDIKM |
| | | | ATEITKIISDAEYKKGRGEMNKEPAV |
| | | | LGRPDFEHAKGVSKLLSQVKYKEQF |
| | | | KKEMKSHQYNPLDSASFKQAQIAST |
| | | | LASNVNYKKDYKESLHDPASDLPNL |
| | | | LYLNHALNISKMHSDVKYRENYEKS |
| | | | KGKSMLEFVDTPLYQVSKDVQKMQ |
| | | | SEKIYRKDFEESLKGRPSLDLDKTPEF |
| | | | LHIKQVTNLLKEKEYRKDLEEWMK |
| | | | GKGMTVFEDTPDLIRVKNAAQILNE |
| | | | KQYKKDLETEIKGKGMQVGPDTPEI |
| | | | RRAKKASEIASTKEYKKDLENEIKGK |
| | | | GMEVGMDTPDIQRAKKASEIVSQKE |
| | | | YRKDLETEIIGKGMQVGPFTPEIQRV |
| | | | KRASEIASQKMYKDEAEKMLCNYSA |
| | | | VPDTPEMERIKSTQKNISSVFYKKVV |
| | | | GAGTAVKETPEIERVKKNQQNISSIK |
| | | | YKEETQHATPISDPPELRRIKENQKNI |
| | | | SNVHYKEQLCRATPVSVTPEIERVKR |
| | | | NQENVSMVHYREQPGKATAVSITPEI |
| | | | ERVKKNQDNISSVKYSSDQRQMKGR |
| | | | RSVILDTPELRHVKETQNNISMVKYH |
| | | | EDFEKTKGRGFTPVVDDPITERVRKN |
| | | | TQVVSDAAYKGVHPHIVEMDRRPGII |
| | | | VDLKVWRTDPGSIFDIDPLEDNIQSR |
| | | | SLHMLSERASRYSKQYLHSTSLGDY |
| | | | KSDGSDTNPTFSYCSEITRPSDEGAPV |
| | | | LPGAYQQSQSQGYGYMHQTSMSSM |
| | | | RSVHSQPHPAGLRTYRAMYDYSAQ |
| | | | DEDEVSFRDGDYIINVQPIDDGWMY |
| | | | GTVQRTGKTGMLPANYIEFVN |
| SEQ ID | F1MMX2 | Nebulin-related- | MNVQACSRCGYGVYPAEKINCLDQI |
| NO: 157 | (UniProtKB) | anchoring | WHKACFHCEVCKMMLSVNNFVSYQ |
| | | protein/Bos | KKPYCHAHNPKNNTFTSVYYTPLNL |
| | | taurus | NVRKPPEAICGIGGQEDGERFKSVFH |
| | | | WDMKSKDEAAAPNRQPQVDERAY |
| | | | WSGYREGDAWCPGALPDPEIVRMV |
| | | | EARKSLGEEYPEDYEQQRGKGSFPA |
| | | | MITPAYQRAKIANQLASQVEYKRGH |
| | | | DERISRFSTVADTPELLRAKAGGQLQ |
| | | | SDVRYTEAYEQQRGKGSFPAMITPA |
| | | | YQIAKRANELASDVRYHQQYQREM |
| | | | KGMAGPAAGAEGPLPKEYMDQYGQ |
| | | | GYSEEYGEHRGKGSFPAMITPAYQN |
| | | | AKKANELASDIKYRQDFNKMKGAA |
| | | | HYHSLPAQDNLVLKRAQSVNKLVSE |
| | | | VEYKKDLESSKGHSINYCETPQFRNV |
| | | | CKISKFTSDNKYKENYQNRMRGRYE |
| | | | GVGMDKRMLHALKVGSLASNIAYK |
| | | | ADYKHDVVDYNYPATLTPSYQTTV |
| | | | KLAPLKDVNYRQSIDKLKYSSVTNTP |
| | | | QIVQAKINAQQLSHVNYRADYEKNK |
| | | | LNYTLPQDVPQLVKARTNAELFSEV |
| | | | KYREGWEKTKGKGFEMKLDAMSLL |
| | | | AAKASGELASNIKYKEEYEKAKGKV |
| | | | LGTTDSRLLHSLQVAKMSSEVEYKK |
| | | | GFEKSKTHFHLPMDMVNIRHAKKAQ |
| | | | ALASDLDYRKRLHEYTVLPEDMKTL |
| | | | WAKKAYGLQSELQYKADLAWMKG |
| | | | VRWLTEGSLNLEQAKKAGQLVSEK |
| | | | NYRQRVDELKFTSVADSSQMEHAK |
| | | | KSQELQSGVAYKAEHEQSVHQYSIS |
| | | | KDEPLFLQARANAANLSEKLYKSSW |
| | | | ENQKAKAFDLRLDSLAFLAAKAKRD |
| | | | LASEVKYKEDYEKSRGKLIGAQGAQ |
| | | | GDSQMSHSLQMSKLQSELEYKKGFE |
| | | | DTKSQCHVPLDMIHLVHARKAQHLA |
| | | | TDIGYKTASHHFTALPTDMKVEWAK |
| | | | KAYGLQSDNQYRADVKWMKGTGW |
| | | | VATGSLNVEQAKKAGELISEKKYRQ |
| | | | HPDALKFTSIKDTPEMVQARISYTQA |
| | | | VDRLYREQGENLKHHYTQTTDLPEV |
| | | | LLAKLNAMNISETRYKESWSKLRDG |
| | | | GYKLRLDAIPFQAAKASGEIISDYKY |
| | | | KEAFEKMKGQMLGSRSLEDDISLAH |
| | | | SVYASSLQSQVNYKKDFEHSKAQFH |
| | | | LPLDMVTLVHAKKAQTLASDQDYR |
| | | | HPLPQYTSLAEDLRLSCAKRAHKLQ |
| | | | SENLYRSDLNFMRGVACVIPGTLEIE |
| | | | GRKRASELISESKYRQHPQSLKYTAV |
| | | | TDTPSLTHAKLSNQITNERLYKAAGE |
| | | | DARHQYTMTLGLPEFVRAKTNAAN |
| | | | LSDAKYKESWRNLHAQGYKLTIDAL |
| | | | PFQAARVSGDIASDFLYRHDFVKER |
| | | | GRLIGAQSVSDDPRLQHCQRVGQLQ |
| | | | SELQYRRQAAGSRAQCHLPMDMVP |
| | | | LVHARKAQALASDLDYRTQCHAFT |
| | | | ALPEDLRMAWAKKAHALQSELRYK |
| | | | SDLMGMKGTGWLALSSPQIESAKKA |
| | | | GELISETKYREKPDTIKFTTVVDSPDL |
| | | | VHAKNSYMHCNERLYRSGDAESRH |
| | | | RYTLVPDHPDFTRARLNALNLSDKV |
| | | | YRHSWEQTRAGGYDFRLDAIPFQTA |
| | | | RASREIASDFRYKEAFLRDRGLQIGY |
| | | | RSINDDPRTKHFLSVGRLQSDNEYKK |
| | | | DFAKSRSQFHSRPDQPGFLQAKRSQ |
| | | | QLASDVHYRQPLPQPTCDPEQLGLK |
| | | | HAQKAHRLQSDVKYKSDLNLTRGIG |
| | | | WTPPGSYKVEMARRAAELANARGL |
| | | | GLQGAYGGPEAVEPRDDQSGFVNPD |
| | | | ATEILHVKRRKAPLF |
| SEQ ID | XP_003641574.1 | nebulin-related- | MNVQPCARCGYGVYPAEKINCIDQT |
| NO: 158 | (NCBI) | anchoring | WHKACFHCEVCKMMLTVNNFVSHE |
| | | protein isoform | KKPYCQVHNPKNNAFTSIFETPINLN |
| | | X1/Gallus gallus | AKKLSEVVSEVKYREESEQFKSAFQ |
| | | | WDVRSRDIEAAYKAQHLSSQNAYY |
| | | | AAYEGGTSWYSGNMPDPQMVTVTQ |
| | | | AQKNLNDLQYTEEYELRQGKGSFPA |
| | | | MITPGYQVAKRATQLSSNVEYRRGH |
| | | | EERVSKFTSVVDTPDILHAKAGGQL |
| | | | ASDLKYTEDFEEQRGKGSFPAMITPA |
| | | | YQIAKRANELASDVKYHQTYEKEIK |
| | | | GKASHTAGTDVTFTRENVDQYGQD |
| | | | YMNEYEERRGKGSFPAMITPAYQNA |
| | | | KKANELASDIKYKKDLSKMKGAAH |
| | | | FHSLTAEDNLVLKQAQSANKLVSEV |
| | | | EYKKDLGNNRGYSVNYCDTPQFKN |
| | | | VSKISKYTSDIKYKETYQNQMKGHY |
| | | | MGIGMDKRMLHAMKVGNLASNIAY |
| | | | KSDYKHDGVDYNYPATLTPSYQTTR |
| | | | KLVPLKDVNYRQSIDKMKYSSVAST |
| | | | PEIAQAKINAQQLSDLNYRAQYEKT |
| | | | KTNYTLPQDIPQLVKAKANAELYSE |
| | | | VKYKEGWEKSKGQGFEMKLDSLPL |
| | | | LAAKASRDLASDIKYKEEYEKTKGK |
| | | | AIETKDSRLLHSLQVAKMSSEIAYKK |
| | | | DFEESKTHFHLPMDMVNLRHAKKA |
| | | | QALASDLDYRKRLHEYTVVPEDLKT |
| | | | KWAKKAYGLQSDLQYREDLMWMK |
| | | | GVGCITEGSLNIQQAKKAGDLVSEK |
| | | | KYRQKVDALKFTSVADSSHIKHAKK |
| | | | SQELQSDVAYRSGKEQFLHQYTITK |
| | | | DDPVFLLAKANAANISEKLYRSSWE |
| | | | KQKEKGFVLRLDALSFLTAKAKRDL |
| | | | ASDIKYKEGYEKMKGKLIGVKAVEE |
| | | | DSKMAHSLQMSKLQSDLEYKKAFE |
| | | | DTKNQFQVSMDMANLVHAKKAQN |
| | | | LASDKGYRTALHHYTVLPTDRKVA |
| | | | WAKWAYGLQSDNRYRADLNWMKG |
| | | | AGWIATGSLNVEQAKKAGELISEKK |
| | | | YRQHPYALKFTSIKDTPEMIQARISY |
| | | | NQAVDRLYKEHGESIKHQYTLTADL |
| | | | PEILRAKLNTMNISEIRYKESWQKMK |
| | | | DGGYQLRLDAIPFQAAKASGEIISDH |
| | | | KYKEAFEKMKGQMIGSCGLDGDIRI |
| | | | AHSVHASSLQSDVKYKQGFEDTKTH |
| | | | FHLPLDMINLVHARKAQSLVSEQEY |
| | | | RQLLHQYTSLTDDLRLQCAKNAYKL |
| | | | QSENLYRSDMNFMRGVGCITPGALEI |
| | | | EGKKKASELISESKYRQQPHSFKYTS |
| | | | VTDSPGLLHAKFSNMIANERLYKAA |
| | | | GEDIQHHYTPTLGLPEFTQARINAAN |
| | | | LSDVKYRESWHNLCAQGYKLTMEA |
| | | | LPFQTARASREIASDYQYKHNFVME |
| | | | RGKHIGARSVLDDTRLLHCLHAAKL |
| | | | QSEQEYKKGSQGVWSQYYLPMDMV |
| | | | NLVHARKAQALASDQEYRKRLHEFT |
| | | | ALPEDLKMKWAKRAHMLQSEHRYK |
| | | | SDLNFMKGVGWMALRSPQIESVKK |
| | | | AGELISETKYRQKPESLKFTAVVDSP |
| | | | DLIHAKNSYLQCNDRLYKAGDSEAR |
| | | | HRYTLPPDHPDFIRARQNALNISDKV |
| | | | YKTSWEQTRASGYDFRIDAIPFQTAK |
| | | | ASREIASDYKYREAFLRDRGQRIGFF |
| | | | SANDDAHTRHVLRVGKLQSDNLYRS |
| | | | GYAQNRGHFQSHLNQPGFLHAKRSQ |
| | | | QLASNVNYKQPLHQYTCDPEQLNVK |
| | | | HAKQAYKLQSDVKYKSDLNWLRGI |
| | | | GWTPPGSYKVERARRAAELAYLRE |
| | | | MGLQAASAQYGPEADQVGPEGSQQ |
| | | | VTVNPDASEILQVKRRKMQLYK |
| SEQ ID | P08728 | Keratin, type 1 | MTSYSYRQSSSTSSFGGMGGGSMRF |
| NO: 159 | (UniProtKB) | cytoskeletal | GAGGAFRAPSIHGGSGGRGVSVSSA |
| | | 19/Bos taurus | RFVSSSSGGYGGGYGGALATSDGLL |
| | | | AGNEKLTMQNLNDRLASYLEKVRA |
| | | | LEEANGDLEVKIRDWYQKQGPGPAR |
| | | | DYSHYFKTIEDLRDQILGATIENSKIV |
| | | | LQIDNARLAADDFRTKFETEQALRM |
| | | | SVEADINGLRRVLDELTLARTDLEM |
| | | | QIEGLKEELAYLKKNHEEEMSVLKG |
| | | | QVGGQVSVEVDSAPGIDLAKILSDM |
| | | | RSQYEVIAEKNRKDAEAWFISQTEEL |
| | | | NREVAGHTEQLQISKTEVTDLRRTLQ |
| | | | GLEIELQSQLSMKAALEGTLAETEAR |
| | | | FGAQLAQIQALISGIEAQLSDVRADT |
| | | | ERQNQEYQHLMDIKTRLEQEIATYR |
| | | | NLLEGQDAYFNDLSLAKAL |
| SEQ ID | E1BF23 | Myomesin | MSLVAVPFYQKRHKHFDQSYRNIQT |
| NO: 160 | (UniProtKB) | 2/Bos taurus | RYLLDEYSAKKKRASAQSSLQRSVT |
| | | | RKSSSQRESSRAALGRTTCRLCAKR |
| | | | MSSALEEEAQERKRRYQSMVAAYG |
| | | | EAKRERYLSELAQLEEDVHVARTHA |
| | | | RDQLDRLALQHAVDDRLAWERHSF |
| | | | EERISRAPEILVRLRSHTVWERMSVK |
| | | | LCFTVQGFPTPVVQWYKDGSLICQA |
| | | | GEPGKYRIDSKYGVHTLEINRADFDD |
| | | | TATYSAVATNVHGQVSTNAAVVVR |
| | | | RFRGDEEPFHSVGLPIGLPLSSVIPYT |
| | | | HFDVQFIEKFGVTFRREGETLTLKCT |
| | | | LLVTPDLKRVQPRAEWYRDDVLLKE |
| | | | SKWTKMFFGEGQASLSFSHLNKDDE |
| | | | GLYTLRIVSRGGITDHSAFLFVRDAD |
| | | | PLVTGAPGAPMDVHCHDVNRDYVI |
| | | | VTWKPPNATKESPVIGYFIDRCEVGT |
| | | | DNWIQCNDAPVKICKYPVTGLFEGR |
| | | | SYIFRVRAVNSAGISRPSRVSEAVAA |
| | | | LDPVDLRRLQAVHLEGEKDIVVYQE |
| | | | ELEGEVQIPGPPTNVHASETSRTYVV |
| | | | LSWDPPEPRGKEPLMYFIEKSMVGS |
| | | | GSWQRVNAQTAVRSPRYAVFDLAE |
| | | | GKPYVFRVLSANKHGLSDPSEITAPI |
| | | | QAQDTIVVPSAPGRVLASRNTRTSVV |
| | | | VQWDRPKHEEDLLGYYVDCSVAGS |
| | | | NVWEPCNHKPIGYNRFVVHGLTTGE |
| | | | QYIFRVKAVNAVGTSENSQESDVIKV |
| | | | QAALTVPSHPYGITLLNCDGHSMILG |
| | | | WKVPKFSGGSPILGYYVDKREAHHK |
| | | | NWHEVNSSPLKERILTVEGLTEGSLY |
| | | | EFKIAAANMAGIGQPSDPSELFKCEA |
| | | | WTMPEPGPAYDLTFCEVRDTSLVLL |
| | | | WKPPVYSGSSPVSGYFVDYKEEDSG |
| | | | EWLTVHETATPHRYLKVCDLHQGK |
| | | | TYVFRVRAVNASGVGRPSDTSEPVL |
| | | | VEARPGTKEVSAGVDEEGNVYLSFD |
| | | | CPEVTDASHFTWCKSYEDIADDDRF |
| | | | KVETAGDHSKLYFKNLDKEDLGTYS |
| | | | VSVSDTDGVSSSFVLDEEELERLKAL |
| | | | SNEIKNPTIPLKSELAYEIFDKGQVRF |
| | | | WLQAEHLSPDSSYRFIINDREVADSE |
| | | | THRIKCDKSTGIIEMVMDRFTIDNEG |
| | | | TYTVQIQDGKAKSQSSLVLIGDAFKA |
| | | | VLKEAEFQRKEFLRKQGPHFAEYLH |
| | | | WDVTEECEVRLVCKVANTKKETVF |
| | | | KWLKDDVLYETEKMPDLEKGVCEL |
| | | | LIPKLSKKDHGEYKATLKDDRGQDV |
| | | | STLEIAGKVYEDMILAMSRVCGASA |
| | | | SPLKILCTPEGIRLQCFMKYFTEEMK |
| | | | VNWYHKDAKITSSEHMRIGGNEQM |
| | | | AWLQICEPTEKDKGKYTFEILDGKK |
| | | | NHQRSLDLSGQAFDEAFAEFQQLKA |
| | | | AAFAEKNRGKVIGGLPDVVTIMEGK |
| | | | TLNLTCTVFGNPDPEVVWFKNDKDI |
| | | | ELSDHFSVKVEQGKYVSMTIKGVTS |
| | | | EDSGKYSIHVKNKYGGEKIDVTVSV |
| | | | YKHGEEIPDVVLPQQAKPKLLPAAA |
| | | | PSPAH |
| SEQ ID | F1N0L9 | Myopalladin/ | MQDDSLEASTSISQLLRESYLAETRH |
| NO: 161 | (UniProtKB) | Bos taurus | RGNNERSRAEPSSNPFHFGGSSGAAE |
| | | | GGGGQDDLPDLSAFLSQEELDESVN |
| | | | LARLAINYDPLEKADEAQARKRFSS |
| | | | DQTKHSSISSFDPNFCQDNSQSPTNS |
| | | | KESLQETKRPQYSSEAQSKKVFLNK |
| | | | AADFIEELSSLFKAHSSKRIRPRACKN |
| | | | HKSKLESQNQVMQENSSSFPDLSERR |
| | | | ERSSVPIPIPADTRDNEVNHALEQQE |
| | | | AKRREAEQAAGEAASGDTTPGSSPSS |
| | | | LYYEEPLGQPPRFTQKLRSREVPEGT |
| | | | RVQLDCIVVGIPPPQVRWYCEGKELE |
| | | | NSPDIHIIQAGNLHSLTIAEAFEEDTG |
| | | | RYSCFASNIYGTDSTSAEIYIEGVSSS |
| | | | DSEGDPNKDEMNRIQKPNEVSSPPTT |
| | | | SAGIPSAVPQTQHVVVQPRVSTIQQC |
| | | | QSPTNYLQGLDGKPIIAAPVFTKMLQ |
| | | | NLSASEGQLVVFECRVKGAPSPKVE |
| | | | WYREGTLIEDSPDFRILQKKPRSMAE |
| | | | PEEICTLVIAEVFAEDSGCFTCTASNK |
| | | | YGTVSSIAQLDVRGNEDLRNNGSLH |
| | | | SANSTTNLALTEQQPSPPNPEPPVEQP |
| | | | PKPKLEGVLVNHNEPRSSSRIGLRVH |
| | | | FNLPEDDKGSEESSEGGVVTTHQTRP |
| | | | DSFQERFNGQSAKISEPSSPVKEPPPV |
| | | | LAKPKLDSSQLQQLHNQVLLEQHHL |
| | | | QNPSPSSPKEFPFNMSVLNSTTVPAV |
| | | | TVSSKHAKAPPSQTFSLARPKHFFPS |
| | | | TSTTVASVSPSSSPVFTLSSTPQAMQR |
| | | | TMSKESLLVTHPSAQTKSLGGASIQN |
| | | | EPLPTPAPTEPAQLPLTFSISSGNQFQP |
| | | | RCVSPAPVSPTGRIQNPVAFLSSVLPS |
| | | | LPAIPPTNAMGLPKSAPSMPSQGLMK |
| | | | KNTKSSHPVSDDYIRETKNAVILDLG |
| | | | KKMNFSDVRSNQQEYKISSFEQRLM |
| | | | NEIEFRLERTPVDESDDEIQHDEIPTG |
| | | | KCIAPIFDKRLKHFRVTEGSPVTFTCK |
| | | | IVGIPVPKVYWFKDGKQISKRNEHFK |
| | | | MKREGDGTCSLHINSTSSDDDGNYTI |
| | | | MAANPQGRISCSGHLMVQGLPIRSRL |
| | | | TAAGQSHRGRSRVQERDKEPLQERF |
| | | | FRPHFLQAPGDMVAHEGRLCRLDCK |
| | | | VSGLPPPELTWLLNGQPVLPDTSHK |
| | | | MLVRETGVHSLLIDPLTQRDAGTYT |
| | | | CIATNKTGQNSFSLELTVVAKEVKK |
| | | | APVILEKLQNSGVPEGHPVRLECRVI |
| | | | GMPPPVFYWKKDNETIPFTRERISMH |
| | | | QDTTGYVCLLIQPAKKSDAGWYTLS |
| | | | AKNEAGIVSCTARLDIYAQWHHQIPP |
| | | | PMTVRPSGSRYGSLTSKGLDIFSAFSS |
| | | | MESTMVYSCSSRSVVESDEL |
| | Q5E9V3 | Myozenin-2/Bos | MLSHNTMVKQRKQQASAIMKEIHG |
| | (UniProtKB) | taurus | NDVDVMHLGKKVSIPRDIMLEELSH |
| | | | LSNRGARLFKMRQRRSDKYTFENFQ |
| | | | YETKAQINHNIAMQNEKLDGINLESG |
| | | | SQQAPFTPPNTPDPRSPPNPENIAPGY |
| | | | SGPLKEIPPERFNTTAVPKYYQSPWE |
| | | | QAISNDPELLEALYPKFFKPEGKAEL |
| | | | PDYRSFNRVATPFGGFEKASKMVKF |
| | | | KVPDFDLLLLTDPRFMAFANPLSGRR |
| | | | SFNRTPKGWISENIPIVITTEPTEDNTI |
| | | | PESEDL |
| SEQ ID | NP_001264756.1 | Myozenin 2/ | MLSHSAMVKERKQQASAIMDEIQRN |
| NO: 162 | (NCBI) | Gallus gallus | VSPSLNLGKKVSTPRDIMVEELSTLS |
| | | | NRGARLFKRRQRRSDKYTYENYHY |
| | | | VANKPRNRGEPIHSVKMDGLSVEGIP |
| | | | QHAPMTPPNTPDPRSPPHPDNIAPGY |
| | | | SGPLKEIPPEKFNTTSVPKYYQSPWIE |
| | | | AIRDDPELLEALYPKLFKPEAKPELP |
| | | | DYRSFNRVATPFGGFERASKLVKFK |
| | | | VPDYNLLMLNDPRFMILANPLATRR |
| | | | SFNRTPKGWTSENIPVVFIQPSDSNN |
| | | | VPETEDL |
| SEQ ID | Q1AG08 | Calsarcin 1/Sus | MLSHNTMVKQRKQQASAIMKEIHG |
| NO: 163 | (UniProtKB) | scrofa | NDVDGMDLGKKVSIPRDIMLEELSH |
| | | | LSNRGARLFKMRQRRSDKYTFENFQ |
| | | | YESKAQINHNIAMQNGKLDGNNLES |
| | | | GSQQAPFTPPNTPDPRSPPNPENIAPG |
| | | | YSGPLKEIPPERFNTTAVPKYYQSPW |
| | | | EQAISNDPELLEALYPKLFKPEGKAE |
| | | | LPDYRSFNRVATPFGGFEKASKIVKF |
| | | | KVPDFELLLLTDPRFMAFANPLSGRR |
| | | | SFNRTPKGWISENIPIVITTEPTEDTTI |
| | | | PESDDL |
| SEQ ID | A8E4L9 | SYNC | MASPEPRRGGNGSAQAARATRPEVI |
| NO: 164 | (UniProtKB) | protein/Bos | SPLQEENSASLYELGTWNPEVTLSLE |
| | | taurus | GTLNLEDILYLGDTGDLDEALYVEET |
| | | | EPPEETLHIEETRMPDEALYLEEPVRP |
| | | | EAALYVEEPVKLEGVLYVEEPVKTA |
| | | | SPEQIVHGGDRVLSEAKSKPKESLQA |
| | | | GPSPSTEGSLSIEDLELLEGRFQQCIE |
| | | | AVAQLEEERDQLIHELVLLREPALQE |
| | | | VQQVHRDILAAYKQHAQAELERDG |
| | | | LREEIRLVKQKLFKVTKECVAYQYQ |
| | | | LECRRQDVAQFADFREALTTRAAQL |
| | | | SEELTQLREAYQKQKEQLRQQLEAP |
| | | | QSQRDGHFLQESRRLSAQFESLMAES |
| | | | RQGLEEEYEPQLLRLLERKEAAAKA |
| | | | LQKTQAEIQEMKEALRPLQAEAQKL |
| | | | HLQNRNLEDQITLVRQKRDEEVQQY |
| | | | REQLEEMEERQRQLRSGVQLQQQKN |
| | | | KEMEQLRVSLAEELATYKAMLPKSL |
| | | | EQANAPTSEAGGIETPSQGAV |
| SEQ ID | F1NM11 | Syncoilin, | MDAEGAGTPQAPEGTERPCLSLEEL |
| NO: 165 | (UniProtKB) | intermediate | GEYFQECIEAVEQLEKERDALIEELT |
| | | filament | QLREPALQDIRHAHQEIQAACRLLAK |
| | | protein/Gallus | VELERDNLRDEIRQIKQKLFKVTKEC |
| | | gallus | VACQYQLESRRHDLSQHAAYRDELE |
| | | | SQAGRLTGELSRLRESCEKEKEALRQ |
| | | | RLEAPPCRQDPQYLQESRRLSAEFES |
| | | | LVTRSRRGLEEHYEPQLLRLLERREA |
| | | | GTRALQELQGEVQGMKEALRPLQGE |
| | | | VSRLRLQNRSLEEQIVLVKQKRDEEV |
| | | | GQYREQVEELEDRLKELKNSVQLQQ |
| | | | RKNQELEELRSSLHHELSIYKGCLEIY |
| | | | GHLCKSEEKPDQEC |
| SEQ ID | A0A287BKP7 | Syncoilin, | MASPEPRRGGDGAAQAARETRAEAT |
| NO: 166 | (UniProtKB) | intermediate | SPLQEGNSESLYQLGTWNPEVTLSLE |
| | | filament | GTLNLEDILYLGDPVDLDEALYVEET |
| | | protein/Sus | EKPEETLHIEETRLPDEALYVEEPVKP |
| | | scrofa | EEMLYVEETVKPEEIVCVEQTMKPG |
| | | | ETTSPEPITYGGETVPSEEKPNPEESL |
| | | | RAKPNPSTDGSLSLEDLELLEGRFQQ |
| | | | CVQAVAQLEEERDQLIHELVLLREPA |
| | | | LQEVQQVHQDILAAYKLHAQAELER |
| | | | DGLREEIRLVKQKLFKVTKECVAYQ |
| | | | YQLECRRQDVAQFADFREVLTARAA |
| | | | QLSEELAQLRDAYQKQKEQLRQQLE |
| | | | APPSQRDGHFLQESRRLSARFENLM |
| | | | AESRQGLEEEYEPQLLRLLERKEAAA |
| | | | KALQKTQAEIQEMKEALRPLQAEAR |
| | | | QLHLQNRNLEDQITLVRQKRDEEVQ |
| | | | QYREQLEEMEERQRQLKSGVQLQQ |
| | | | QKNKEMEQLRISLAEELSTYKAMLP |
| | | | KSLERASAPTSEAGGIETQSQGAV |
| SEQ ID | A4FV66 | Sarcoglycan | MAAALIWISLLVGLLEGLGGTEAQQ |
| NO: 167 | (UniProtKB) | alpha/Bos taurus | TTLHPLVGRVFVHTLDHESFLQRPEH |
| | | | VFSVSAPIPITYHAHLQGHPDLPRWL |
| | | | RYTQRSPYQPGFLYGTATPEDRGHQI |
| | | | IEVTAYNRDSFNTTQQMLVLLIGDPE |
| | | | GPLLPYQAEFLVRSHDVEEVLPSIPAS |
| | | | RFLTALGGLWEPAELQLVNITSALDR |
| | | | GGRVPLPIEGRKEGVYIKVGSASPFS |
| | | | TCLKMVVSPDSHARCAQGQPPLLSC |
| | | | YDTLAPHFRVDWCNVSLVDKSVPEP |
| | | | ADEAPAPGDGILEHDPFFCPPTEATN |
| | | | RDFLTDALVTLLVPLLVALLLTLLLA |
| | | | YVMCCRREGRLKRDLATSDIQMVH |
| | | | HRTIRGNTEELRQMASSREVPRPLST |
| | | | LPMFNVHTGERLPPQVDSAQVPLILD |
| | | | QH |
| SEQ ID | Q0VCU7 | Gamma- | MVREQYTTITEGTHIERPENQAVYKI |
| NO: 168 | (UniProtKB) | sarcoglycan/Bos | GIYGWRKRCLYLFVLLLLIVLLVNFA |
| | | taurus | LTIWILRVMWFSPVGMGHLHVTADG |
| | | | LHLEGESEFLFPLYVKEIRSRVDSSLL |
| | | | LQSTQNVTMNARNTEGEVTGRLKV |
| | | | GPQMVEVQSQQFQIHSKDGKPLFTV |
| | | | DEEKVMVGTDKLRVTGPEGALFEHS |
| | | | VETPLVRPDPPQDLRLESPTRSLSMD |
| | | | APKGIHIQAPAGKIEALTQMDIVLQS |
| | | | SDGTVVLDAETVCLPELALGSQGPA |
| | | | GSSQGLYEVCVCPDGKLYLSVAGM |
| | | | GTTCHEHSHLCL |

Skeletal and smooth muscle tissue

| | | | |
|---|---|---|---|
| SEQ ID | P12003 | Metavinculin/ | MPVFHTRTIESILEPVAQQISHLVIMH |
| NO: 169 | (UniProtKB) | Gallus gallus | EEGEVDGKAIPDLTAPVSAVQAAVS |
| | | | NLVRVGKETVQTTEDQILKRDMPPA |
| | | | FIKVENACTKLVRAAQMLQADPYSV |
| | | | PARDYLIDGSRGILSGTSDLLLTFDEA |
| | | | EVRKIIRVCKGILEYLTVAEVVETME |
| | | | DLVTYTKNLGPGMTKMAKMIDERQ |
| | | | QELTHQEHRVMLVNSMNTVKELLP |
| | | | VLISAMKIFVTTKNTKSQGIEEALKN |
| | | | RNFTVEKMSAEINEIIRVLQLTSWDE |
| | | | DAWASKDTEAMKRALALIDSKMNQ |
| | | | AKGWLRDPNAPPGDAGEQAIRQILD |
| | | | EAGKAGELCAGKERREILGTCKTLG |
| | | | QMTDQLADLRARGQGATPMAMQK |
| | | | AQQVSQGLDLLTAKVENAARKLEA |
| | | | MTNSKQAIAKKIDAAQNWLADPNG |
| | | | GSEGEEHIRGIMSEARKVAELCEEPK |
| | | | ERDDILRSLGEISALTAKLSDLRRHG |
| | | | KGDSPEARALAKQIATSLQNLQSKT |
| | | | NRAVANTRPVKAAVHLEGKIEQAQR |
| | | | WIDNPTVDDRGVGQAAIRGLVAEGR |
| | | | RLANVMMGPYRQDLLAKCDRVDQL |
| | | | AAQLADLAARGEGESPQARAIAAQL |
| | | | QDSLKDLKARMQEAMTQEVSDVFS |
| | | | DTTTPIKLLAVAATAPSDTPNREEVF |
| | | | EERAANFENHAARLGATAEKAAAV |
| | | | GTANKTTVEGIQATVKSARELTPQV |
| | | | VSAARILLRNPGNQAAYEHFETMKN |
| | | | QWIDNVEKMTGLVDEAIDTKSLLDA |
| | | | SEEAIKKDLDKCKVAMANMQPQML |
| | | | VAGATSIARRANRILLVAKREVENSE |
| | | | DPKFREAVKAASDELSKTISPMVMD |
| | | | AKAVAGNISDPGLQKSFLDSGYRILG |
| | | | AVAKVREAFQPQEPDFPPPPPDLEHL |
| | | | HLTDELAPPKPPLPEGEVPPPRPPPPE |
| | | | EKDEEFPEQKAGEAINQPMMMAAR |
| | | | QLHDEARKWSSKPVTVINEAAEAGV |
| | | | DIDEEDDADVEFSLPSDIEDDYEPELL |
| | | | LMPTNQPVNQPILAAAQSLHREATK |
| | | | WSSKGNDIIAAAKRMALLMAEMSRL |
| | | | VRGGSGNKRALIQCAKDIAKASDEV |
| | | | TRLAKEVAKQCTDKRIRTNLLQVCE |
| | | | RIPTISTQLKILSTVKATMLGRTNISD |
| | | | EESEQATEMLVHNAQNLMQSVKET |
| | | | VREAEAASIKIRTDAGFTLRWVRKTP |
| | | | WYQ |
| SEQ ID | E1BPV6 | Smoothelin like | MEQKAGKSSEDGATVPPAAEAPEPA |
| NO: 170 | (UniProtKB) | 1/Bos taurus | GSGGSAEEETAGPAESAARAGPATA |
| | | | GQQERAPAEDAVSAECQADGLGEV |
| | | | KAESQGEVELQQEDPGQGETAAAHG |
| | | | KTDRKDQTDSEPEGAEGDRETASAS |
| | | | EEQSADEKEARLGSRETVDASREVQ |
| | | | AEPKQASGAQEAEAGGGEAEGPQEE |
| | | | GGKTEEPQAEAREEAGAPAAQPDSE |
| | | | PGSPDEEQDQGAGAEAEDGAGGPPS |
| | | | SPEGWPESPTEEGGSASPEGLSPDTA |
| | | | ASEELGPSASDSSPSDVPQSPTEPPPS |
| | | | EEKKKEKAPERRVSAPTRPRGPRAQ |
| | | | NRKAIVDKFGGAAAGPTALFRNTKA |
| | | | AGAAVGGVRNMLLEWCRAMTRSYE |
| | | | HVDIQNFSSSWGSGMAFCALIHKFFP |
| | | | DAFDYAALDPAQRRHNFTLAFSTAE |
| | | | KLADCAQLLEVDDMVRLAVPDSKC |
| | | | VYTYIQELYRSLVQKGLVKTKKK |

Cardiac and smooth muscle tissue

| | | | |
|---|---|---|---|
| SEQ ID | F1NHA9 | PDZ and LIM | MPQNVILPGPAPWGFRLSGGIDFNQP |
| NO: 171 | (UniProtKB) | domain protein | LIITRITPGSKASTANLCPGDIIVAING |
| | | 3/Gallus gallus | LSTENMTHNDAQERIKAAAHQLSLRI |
| | | | ERAETKLWSPQVSEDGKANPYKINL |
| | | | EAEPQEFKPIGTAHNRRAQPFVAAA |
| | | | NIDDKRQVVSSSYNSPIGLYSSGNIQ |
| | | | DALHGQLRSLIPNASQNDPAPTAVPQ |
| | | | SDVYRMLHSNQEEPSQPRQSGSFKV |
| | | | LQNLVSEEDGRPVGTRSVKAPVTKIP |
| | | | TGLPGAQKVPQCDKCGSGILGTVVK |
| | | | ARDKYRHPECFVCSDCNLNLKQKGY |
| | | | FFVEGQLYCETHARARMRPPEGYEA |
| | | | VTVYPKC |

Skeletal, cardiac, and smooth muscle tissue

| | | | |
|---|---|---|---|
| SEQ ID | Q04205 | Tensin/Gallus | MDFGSVMNQAATPCSPAVNYELPSP |
| NO: 172 | (UniProtKB) | gallus | GQSITKQVDTPDATRSPRGGQAHCK |
| | | | ASRSMSVTAAMESSCELDLVYITERII |
| | | | AVSYPSTAEEQSFRSNLREVAHMLK |
| | | | SKHGDNYVLFNLSERRHDISKLHPK |
| | | | VLDFGWPDLHTPALEKICSICKAMDT |
| | | | WLNAAAHNVVVLHNKGNRGRLGV |
| | | | VVAAYMHYSNISASADQALDRFAM |
| | | | KRFYEDKVVPVGQPSQKRYIHYFSG |
| | | | LLSGSIKMNNKPLFLHHVIMHGIPNF |
| | | | ESKGGCRPFLKIYQAMQPVYTSGIYN |
| | | | VQGDSQTGICITIEPGLLLKGDILLKC |
| | | | YHKKFRSPTRDVIFRVQFHTCAVHD |
| | | | LDIVFGKEDLDEAFRDERFPEYGKVE |
| | | | FVFSYGPEKIQGMEHLENGPSVSVDY |
| | | | NTSDPLIRWDSYENFNIQREDSAEGT |
| | | | WAEPALPGKHLEKEVGHTQGPLDGS |
| | | | LYAKVKKKDSLHGSIGAVNTARLPL |
| | | | SAAPNHVEHTLSVSSDSGNSTASTKT |
| | | | DRTDEPGAPGAPTGHAVLSPEEKRD |
| | | | VDRLLVGFGLESAAPMHNHAPGPAP |
| | | | ARLPAGPGRHVVPAQVHVNGAGTPL |
| | | | LAERETDILDDELPNQDGHSVGSLGT |
| | | | LSSLDGTTTASEAGFHEAPRVGSLSS |
| | | | LPNGPASYNGAEKMLKEGLYEAEPL |
| | | | SNGAYPYSNQNTLMGHHLRDPLAHL |
| | | | RPSRSAQEHLAGYPQRQPASASPAW |
| | | | LQPPVPQPYLYGYDLPSAHRSQSFPA |
| | | | VGTAKYEANLALPQAPARSTSSREA |
| | | | VQRGLNSWQQQGGSRPPSQLHDGG |
| | | | LESHSPSLSSCSPQPSPLQPMPPHSHS |
| | | | MPEFPRAPSRREIEQSIEALDVLMLD |
| | | | LAPSVHKSQSVPSAATRQDKPAAML |
| | | | SSLSAQRLSGHYAQPTPQVVQPRSFG |
| | | | TSVGTDPLAKPYSPGPLVPAARSTAE |
| | | | PDYTVHEYRETYTPYSYQPVPEPRSY |
| | | | GSAPASILPLSASYSPAGSQQLLVSSP |
| | | | PSPTAPAQSQLPHKGLESYEDLSRSG |
| | | | EEPLNLEGLVAHRVAGVQSREKSPE |
| | | | ESTVPARRRTPSDSHYEKSSPEPGSPR |
| | | | SPTVLSPEVVSTIAANPGGRPKEPHL |
| | | | HSYKEAFEEMESASPSSLTSGGVRSP |
| | | | PGLAKTPLSALGLKPHNPADILLHPV |
| | | | GELEGEAGADSEEEPRSYVESVART |
| | | | ATTGRAGNLPAAQPVGLEVPARNGA |
| | | | FGNSFTVPSPVSTSSPIHSVDGASLRS |
| | | | YPSEGSPHGTVTPPHAVAETAYRSP |
| | | | MVSQTPSAHSSYQTSSPSSFQAGTLG |
| | | | SPYASPDYPDGRGGFQPDPQARQQP |
| | | | QVSVVGVHALPGSPRTLHRTVATNT |
| | | | PPSPGFGRRAANPAVASVPGSPGLGR |
| | | | HTVSPHAPPGSPSLARHQMAAVPPG |
| | | | SPMYGYSSPEERRPTLSRQSSASGYQ |
| | | | PPSTPSFPVSPAYYPGTSTPHSSSPDS |
| | | | AAYRQGSPTPQPALPEKRRMSAGER |
| | | | SNSLPNYATVNGKASSPLSSGMSSPS |
| | | | SGSAVAFSHTLPDFSKFSMPDISPETR |
| | | | ANVKFVQDTSKYWYKPDISREQAIA |
| | | | LLKDREPGAFIIRDSHSFRGAYGLAM |
| | | | KVASPPPTVMQQNKKGDITNELVRH |
| | | | FLIETSPRGVKLKGCPNEPNFGCLSA |
| | | | LVYQHSIMPLALPCKLVIPDRDPMEE |
| | | | KKDAASTTNSATDLLKQGAACNVLF |
| | | | INSVEMESLTGPQAISKAVAETLVAD |
| | | | PTPTATIVHFKVSAQGITLTDNQRKL |
| | | | FFRRHYPLNTVTFCDLDPQERKWTK |
| | | | TDGSGPAKLFGFVARKQGSTTDNVC |
| | | | HLFAELDPDQPAAAIVNFVSRVMLG |
| | | | SGQKR |
| SEQ ID | A0A1D5PNS4 | Gelsolin/Gallus | MSEVGEEQNGGRGAGLGGITAALGL |
| NO: 173 | (UniProtKB) | gallus | VLIPIPIPILVPVPIPIPIPIPPPQGRKGQ |
| | | | SRHRALAGAGPGWGGVRAVTAPGA |
| | | | ARCARPRAPQLRPARPERQQQPVSM |
| | | | VEHAEFSKAGKEPGLQIWRIEKFDLV |
| | | | PVPKNLYGDFFTGDSYLVLNTIRQRS |
| | | | GNLQYDLHFWLGDESSQDERGAAAI |
| | | | FTVQMDDYLQGKAVQHREVQGHES |
| | | | STFLGYFKSGIKYKAGGVASGFRHV |
| | | | VPNEVTVQRLLQVKGRRTVRATEVP |
| | | | VSWESFNTGDCFILDLGSNIYQWCGS |
| | | | NSNRQERLKATVLAKGIRDNERNGR |
| | | | AKVFVSEEGAEREEMLQVLGPKPSL |
| | | | PQGASDDTKTDTANRKLAKLYKVSN |
| | | | GAGNMAVSLVADENPFSQAALNTE |
| | | | DCFILDHGTDGKIFVWKGRSANSDE |
| | | | RKAALKTATDFIEKMGYPKHTQVQV |
| | | | LPESGETPLFKQFFKNWRDKDQTEG |
| | | | LGEAYISGHVAKIEKVPFDAATLHTS |
| | | | RAMAAQHGMEDDGSGKKQIWRIEG |
| | | | SEKVPVDPATYGQFYGGDSYIILYDY |
| | | | RHAGKQGQIIYTWQGAHSTQDEIAT |
| | | | SAFLTVQLDEELGGSPVQKRVVQGK |
| | | | EPPHLMSMFGGKPLIVYKGGTSREG |
| | | | GQTTPAQTRLFQVRSSTSGATRAVEL |
| | | | DPVASQLNSNDAFVLKTPSAAYLWV |
| | | | GRGSNSAELSGAQELLKVLGARPVQ |
| | | | VSEGREPDNFWVALGGKAPYRTSPR |
| | | | LKDKKMDAHPPRLFACSNKSGRFTIE |
| | | | EVPGDLTQDDLATDDVMILDTWDQ |
| | | | VFVWIGKDAQEEEKTEALKSAKRYI |
| | | | ETDPASRDKRTPVTLVKQGLEPPTFS |
| | | | GWFLGWDDDYWSVDPLQRAMADV |
| | | | DV |
| SEQ ID | XP_025010159.1 | Dystroglycan | MTVGCVPQPPFLGRTLLPVLLLAASA |
| NO: 174 | (NCBI) | isoform | RCHWPSEPAEVVRDWENQLEASMH |
| | | X1/Gallus gallus | SVLSDLRETVPAVVGIPDSSAVVGRF |
| | | | FRVSIPTDLIASNGEAVQVSEAGKES |
| | | | LPSWLHWNAESSSLEGLPLDTDKGV |
| | | | HYISVTTLQPFPNGSYVPQAANVFSV |
| | | | EVHQEDHSEPQSVRAAAQEAGDAAP |
| | | | FVCGAEEPVTILTVILDADLTKMTPK |
| | | | QRIELLNRMRSFSEVELHNMKLVPV |
| | | | VNNRLFDMSAFMAGPGNAKKVVEN |
| | | | GALLSWKLGCSLSQNSVPNISKVEAP |
| | | | AKEGTMSARLGYPVVGWHIANKKP |
| | | | HLPKRMRRQINATPTPLTAIGPPTTA |
| | | | AQEPPTRIVPTPTSPAIAPPTETTAPPV |
| | | | REPIPLPRKPTVTIRTRGPIVQTPTLGP |
| | | | IQPTRLVEGTGTVSVPIRPTVPGYVEP |
| | | | TAVITPPTTTTKKPRVSTLKPATPSTT |
| | | | DSSTATTRRPTRRPKTPRPTKPPSTTR |
| | | | STISKLTTASPPTRVRTTASGVPRPWE |
| | | | PNEPPKLTNHIDRVDAWEGTYFEVKI |
| | | | PSDTFYDKEDTTTDKLQLTLKLKEQ |
| | | | QMIEENSWVQFNSTSQLMYGMPDRS |
| | | | HVGKHEYFMYATDKGGLFAVDAFEI |
| | | | HVHKRPHGDKSPVKFKARLEGDHSA |
| | | | VANDIHKKIMLVKKLALAFGDRNSS |
| | | | TITVQDIAKGSIVVEWTNNTLPLEPCP |
| | | | REQIRTLSKKIADDSGGPSPAFSNILQ |
| | | | PEFKPLNVSVVGSGSCRHIQFVPVTK |
| | | | DGRVISEATPTLAAGKDPEKSSEDDV |
| | | | YLHTVIPAVVVAAILLVAGIIAMICY |
| | | | RKKRKGKLTIEDQATFIKKGVPIIFAD |
| | | | ELDDSKPPPSSSMPLILQEEKAPLPPP |
| | | | EYPNQSMPETTPLNQDTIGEYTPLRD |
| | | | EDPNAPPYQPPPPFTAPMEGKGSRPK |
| | | | NMTPYRSPPPYVPP |
| SEQ ID | P12003-1 | Vinculin | MPVFHTRTIESILEPVAQQISHLVIMH |
| NO: 175 | (UniProtKB) | isoform 1/Gallus | EEGEVDGKAIPDLTAPVSAVQAAVS |
| | | gallus | NLVRVGKETVQTTEDQILKRDMPPA |
| | | | FIKVENACTKLVRAAQMLQADPYSV |
| | | | PARDYLIDGSRGILSGTSDLLLTFDEA |
| | | | EVRKIIRVCKGILEYLTVAEVVETME |
| | | | DLVTYTKNLGPGMTKMAKMIDERQ |
| | | | QELTHQEHRVMLVNSMNTVKELLP |
| | | | VLISAMKIFVTTKNTKSQGIEEALKN |
| | | | RNFTVEKMSAEINEIIRVLQLTSWDE |
| | | | DAWASKDTEAMKRALALIDSKMNQ |
| | | | AKGWLRDPNAPPGDAGEQAIRQILD |
| | | | EAGKAGELCAGKERREILGTCKTLG |
| | | | QMTDQLADLRARGQGATPMAMQK |
| | | | AQQVSQGLDLLTAKVENAARKLEA |
| | | | MTNSKQAIAKKIDAAQNWLADPNG |
| | | | GSEGEEHIRGIMSEARKVAELCEEPK |
| | | | ERDDILRSLGEISALTAKLSDLRRHG |
| | | | KGDSPEARALAKQIATSLQNLQSKT |
| | | | NRAVANTRPVKAAVHLEGKIEQAQR |
| | | | WIDNPTVDDRGVGQAAIRGLVAEGR |
| | | | RLANVMMGPYRQDLLAKCDRVDQL |
| | | | AAQLADLAARGEGESPQARAIAAQL |
| | | | QDSLKDLKARMQEAMTQEVSDVFS |
| | | | DTTTPIKLLAVAATAPSDTPNREEVF |
| | | | EERAANFENHAARLGATAEKAAAV |
| | | | GTANKTTVEGIQATVKSARELTPQV |
| | | | VSAARILLRNPGNQAAYEHFETMKN |
| | | | QWIDNVEKMTGLVDEAIDTKSLLDA |
| | | | SEEAIKKDLDKCKVAMANMQPQML |
| | | | VAGATSIARRANRILLVAKREVENSE |
| | | | DPKFREAVKAASDELSKTISPMVMD |
| | | | AKAVAGNISDPGLQKSFLDSGYRILG |
| | | | AVAKVREAFQPQEPDFPPPPPDLEHL |
| | | | HLTDELAPPKPPLPEGEVPPPRPPPPE |
| | | | EKDEEFPEQKAGEAINQPMMMAAR |
| | | | QLHDEARKWSSKGNDIIAAAKRMAL |
| | | | LMAEMSRLVRGGSGNKRALIQCAK |
| | | | DIAKASDEVTRLAKEVAKQCTDKRI |
| | | | RTNLLQVCERIPTISTQLKILSTVKAT |
| | | | MLGRTNISDEESEQATEMLVHNAQN |
| | | | LMQSVKETVREAEAASIKIRTDAGFT |
| | | | LRWVRKTPWYQ |
| SEQ ID | E1C8N4 | Supervillin/ | MKRKERIARRLEGIENDTQPMLLQN |
| NO: 176 | (UniProtKB) | Gallus gallus | CPGSVTHRLLEEDTPRYMRATDPYS |
| | | | HHLGRSNEEEEASDSSVEKQPRSSRY |
| | | | RTETTGGNTESLYSTGNMDTHELES |
| | | | KAERIARYKAERRRQLAEKYGLSLD |
| | | | SDLDSDYSSRYSRARKDPDSVERKA |
| | | | LRSERHDDENKDSGSLYLSRTEVKES |
| | | | KSVLSESREYSSREKDGIPAKEELSNE |
| | | | KSDKRADDDSAIRQASDPSATLDSSV |
| | | | SLTLSGRESSSCNEVPISPKQSPRESLS |
| | | | SPKRAASPIHLQNDQPLHSNIRQSESR |
| | | | FEMSTSGSALSAGGDRERGPRRPRR |
| | | | YFTPGENRKTSERFKTQPITSAERKET |
| | | | DRSIMCAEIPTADDEEKLDDRAKLSV |
| | | | AAKRLLFREMEKSFEMKNIPKPPTRS |
| | | | SAVERRMRRLQDRSHTQPITSEEVVI |
| | | | AATLQASAHQKILAKEEIRAAKEAM |
| | | | GQDQSDEPDSSTLSLAEKMALFNKL |
| | | | SQPVSRAISTRSRGDIRHRRMNTRYQ |
| | | | TQPVTLGEVEQVQNESGKLTPLSSTV |
| | | | STSVSAMASALSALFAGDMHAKSRS |
| | | | DGSVSAATKDELRFHASAESSDSSGK |
| | | | RTQKSEQWQPSMEVLESKRASKKHE |
| | | | EEGKRFLAHEANEIRKYSSFEDETTH |
| | | | PVLEKTGDYHKEAAYSFLRKGSMEL |
| | | | FSSQPLFQPLERKEIDTIMQDHVEPTS |
| | | | ELTSTPATRTLSQTTAAASCRLQELS |
| | | | EQLEGKFYKNSCEMFSAGENKIQTTE |
| | | | DATDSSSKTMSIKERLALLKKSGEED |
| | | | WKSRLSKKQEYAKVSATDRSAQMQ |
| | | | EVEQLLKKRIADNQESQMTIEERKHL |
| | | | ITAREEAWKSRGKGAANDSTQFTVA |
| | | | GRMVKKGLASPSALTPVASPYGNRQ |
| | | | KSTTPVTKPLEEIEARPDMQLESDMK |
| | | | LDKLESFLGRLNNKVAGMQETVLTV |
| | | | TGKSVKEVMKLDDDETFSKFYRRVD |
| | | | FPSSSVPLDLDEDFDAIFDPYAPKLIS |
| | | | SVAEHKRAVRPMRRVQSSRNPLKML |
| | | | AAREDILHEYTEQRLNVAFMESKRM |
| | | | KVEKMSANSNFSEVALAGLASKENF |
| | | | SNVSLRSVNLTEQNSNNSAVPYKKL |
| | | | MLLQIKGRRHVQTRLVEPRASSLNS |
| | | | GDCFLLLTPHLCFLWVGEFANVIEKA |
| | | | KASELATLIQTKRELGCRASYIQTIEE |
| | | | GINTHTHAAKDFWKLLGGQANYQS |
| | | | AGRPEEDEMYEAAIIETNCIYRLVED |
| | | | KLIPEDDYWGKMPKCTLLQPKEVLV |
| | | | FDFGSEVYVWHGKEVTLAQRKVAF |
| | | | QLAKHLWNGTFDYSNCDINPLDPGE |
| | | | CNPLIPRKGQGRPDWAVFGRLTEHN |
| | | | ETILFKEKFLDWTELKKLNEKNSSES |
| | | | LHQKEESKSDSKPYDVMLMVPVPQT |
| | | | AVGTVLDGMNIGRGYGLVEGEDGR |
| | | | QFEIITASVDVWHILEFDYSRLPKQSI |
| | | | GQFHEGDTYVVKWKYMVSTTVGSR |
| | | | QKGEQQVRAVGKEKCVYFFWQGRH |
| | | | STVSEKGTSALMTVELDEERGAQVQ |
| | | | VLQGKELPCFLQCFQGGMIVHAGRR |
| | | | EEEEENAQSDWRLYCVRGEVPNEGN |
| | | | LLEVACHCSSLRSRTSMIVLNINKALI |
| | | | YLWHGCKAQSHTKDVGRTAANKIK |
| | | | EQCPLEAGLHSSSKVTIHECDEGSEP |
| | | | LGFWDALGRRDRKAYDCMLQDPGK |
| | | | FNFTPRLFSLSSSSGEFSATEYVYPSR |
| | | | DPTVINSMPFLQEDLYTAPQPALFLV |
| | | | DNHHEVYLWQGWWPVENKITGSAR |
| | | | IRWATDRKCAMETVLQYCKGKNVK |
| | | | KPPKSYLIHAGLEPLTFTNMFPSWEH |
| | | | REDIAEITEMDADVSNQIILVEDVLA |
| | | | KLCKTVYPLADLLARPLPEGVDPLK |
| | | | LEIYLSDEDFEVALEMTREEYNALPS |
| | | | WKQVNLKKAKGLF |
| SEQ ID | Q5ZL50 | Profilin/Gallus | MAGWQSYVDNLMCDGCCQEAAIVG |
| NO: 177 | (UniProtKB) | gallus | YCDAKYVWAATAGGIFQSITPVEID |
| | | | MIVGKDREGFFTNGLTLGAKKCSVIR |
| | | | DSLYVDGDCTMDIRTKSQGGEPTYN |
| | | | VAVGRAGRVLVFVMGKEGVHGGGL |
| | | | NKKAYSMAKYLRDSGF |
| SEQ ID | A5PJI6 | Caveolae- | MEHNGSASNADKIHQNRLSNVTEDE |
| NO: 178 | (UniProtKB) | associated | DQDAALTIVTVLDKVAAIVDSVQAS |
| | | protein 4/Bos | QKRIEERHRVMENAIKSVQIDLLKFS |
| | | taurus | QSHSNTGYVINKLFEKTRKVSAHIKD |
| | | | VKARVEKQQTHVKKVEAKQEEIMK |
| | | | KNKFRVVIFQEEVQCPTSLSVVKDRS |
| | | | LTESPEEVDEIFDTPVDLSSDEEYFVE |
| | | | ESRSARLKKSGKERIDNIKKAFSKEN |
| | | | MQKTRQNFDKKVNRIRTRIVTPERRE |
| | | | RLRQSGERLRQSGERLKQSGERFKKS |
| | | | ISNAAPSREAFKMRSLRKTKDRAVA |
| | | | EGPEEVREMGVDIIARGEALGPISEL |
| | | | YPEALSETDPEEASATHPPQEGGEVS |
| | | | TPEPLKVTFKPQVKVEDDESLLLDLK |
| | | | Q |
| SEQ ID | Q62234 | Myomesin- | MSLPFYQRSHQHYDLSYRNKDLRTT |
| NO: 179 | (UniProtKB) | 1/Mus musculus | MSHYQQEKKRSAVYTHGSTAYSSRS |
| | | | LAARRQESEAFSQASATSYQQQASQ |
| | | | TYSLGASSSSRHSQGSEVSRKTASAY |
| | | | DYGYSHGLTDSSLLLEDYSSKLSPQT |
| | | | KRAKRSLLSGEETGSLPGNYLVPIYS |
| | | | GRQVHISGIRDSEEERIKEAAAYIAQ |
| | | | KTLLASEEAIAASKQSTASKQSATSK |
| | | | RTTSTLQREETFEKKSRNIAIREKAEE |
| | | | LSLKKTLEETQTYHGKLNEDHLLHA |
| | | | PEFIIKPRSHTVWEKENVKLHCSVAG |
| | | | WPEPRLTWYKNQVPINVHANPGKYI |
| | | | IESRYGMHTLEISKCDFEDTAQYRAS |
| | | | AMNVQGELSAYASVVVKRYKGELD |
| | | | ESLLRGGVSMPLSFAVTPYGYASKFE |
| | | | IHFDDKFDVSFGREGETMSLGCRVVI |
| | | | TPEIKHFQPEVQWYRNGAPVSPSKW |
| | | | VQPHWSGDRATLTFSHLNKEDEGLY |
| | | | TIRVRMGEYYEQYSAYVFVRDADAE |
| | | | IEGAPAAPLDVVSLDANKDYIIISWK |
| | | | QPAVDGGSPILGYFIDKCEVGTDTWS |
| | | | QCNDTPVKFARFPVTGLIEGRSYIFR |
| | | | VRAVNKTGIGLPSRVSEPVAALDPAE |
| | | | KARLKSHPSAPWTGQIIVTEEEPTEG |
| | | | VIPGPPTDLSVTEATRSYVVLSWKPP |
| | | | GQRGHEGIMYFVEKCDVGAENWQR |
| | | | VNTELPVKSPRFALFDLVEGKSYRFR |
| | | | VRCSNSAGVGEPSETTEVTVVGDKL |
| | | | DIPKAPGKIIPSRNTDTSVVVSWEESR |
| | | | DAKELVGYYIEASVVGSGKWEPCNN |
| | | | NPVKGSRFTCHGLTTAQSYIFRVRAV |
| | | | NAAGLSEYSQDSEAIEVKAAIGGGVS |
| | | | PDVWPQLSDTPGGLTDSRGGMNGAS |
| | | | PPTSQKDALLGSNPNKPSPPSSPSSRG |
| | | | QKEVSTVSESVQEPLSSPPQEAAPEE |
| | | | EQSQSEPPKKKKDPVAVPSAPYDITC |
| | | | LESFRDSMVLGWKQPDTTGGAEITG |
| | | | YYVNYREVVGEVPGKWREANIKAV |
| | | | SDAAYKISNLKENTLYQFQVSAMNI |
| | | | AGLGAPSTVSECFKCEEWTIAVPGPP |
| | | | HSVKLSEVRKNSLVLQWKPPVYSGR |
| | | | TPVTGYFVDLKEASAKDDQWRGLN |
| | | | EAAIVNKYLRVQGLKEGTSYVFRVR |
| | | | AVNQAGVGKPSDLAGPVVAETRPGT |
| | | | KEVVVSVDDDGVISLNFECDQMTPK |
| | | | SEFVWSKDYVPTEDSPRLEVENKGD |
| | | | KTKMTFKDLGTDDLGTYSCDVTDTD |
| | | | GIASSYLIDEEEMKRLLALSQEHKFP |
| | | | TVPTKSELAVEILEKGQVRFWMQAE |
| | | | KLSSNAKVSYIFNEKEIFEGPKYKMH |
| | | | IDRNTGIIEMFMEKLQDEDEGTYTFQ |
| | | | IQDGKATGHSTLVLIGDVYKKLQKE |
| | | | AEFQRQEWIRKQGPHFAEYLSWEVT |
| | | | GECNVLLKCKVANIKKETHIVWYKD |
| | | | EREISVDEKHDFKDGICTLLITEFSKK |
| | | | DAGFYEVILKDDRGKDKSRLKLVDE |
| | | | AFQDLMTEVCKKIALSATDLKIQSTA |
| | | | EGIRLYSFVCYYLDDLKVNWSHNGT |
| | | | GIKYTDRVKSGVTGEQIWLQINEPTP |
| | | | NDKGKYVMELFDGKTGHQKTVDLS |
| | | | GQAFDEAFAEFQRLKQAAIAEKNRA |
| | | | RVLGGLPDVVTIQEGKALNLTCNVW |
| | | | GDPPPEVSWLKNEKPLTSDDHCSLKF |
| | | | EAGKTAFFTISGVSTADSGKYGLVV |
| | | | KNKYGSETSDFTVSVFIPEEELRKGA |
| | | | MEPPKGNQKSK |
| SEQ ID | F1MKE9 | Spectrin beta | QPADMTSATEFENVGNQPPYSRINA |
| NO: 180 | (UniProtKB) | chain/Bos taurus | RWDGPDDELDNDNSSARLFERSRIK |
| | | | ALADEREVVQKKTFTKWANSHLVH |
| | | | VSCRITDLYKDLRDGRMLIKLLEVLS |
| | | | GEMLPKPTKGKMRIHCLENVDKALQ |
| | | | FLREQRVHLENMGSHDIVDGNHRLV |
| | | | LGLIWTIILRFQIQDIVVQTQEGRETR |
| | | | SAKDALLLWCQMKTAGYPHVNVTN |
| | | | FTSSWKDGLAFNALIHKHRPDLIDFD |
| | | | KLKDSNARHNLEHAFEVAERELGIIP |
| | | | LLDPEDVFTENPDEKSIITYVVAFYH |
| | | | YFSKMKVLAVEGKRVGKVIDHAIET |
| | | | EKMIEKYSGLASDLLTWIEQTITILNS |
| | | | RKFANSLAGVQQQLQAFSTYRTVEK |
| | | | PPKFQEKGNLEVLLFTIQSRMRANNQ |
| | | | KVYTPHDGKLVSDINRAWESLEEAE |
| | | | YRRELALRDELIRQEKLEQLARRFDR |
| | | | KAAMRETWLNENQRLVAQDNFGYD |
| | | | LAAVEAAKKKHEAIETDTAAYEERV |
| | | | RALEDLAQELERENYHDQKRIMARK |
| | | | DNILRLWDYLQELLQARRQRLEKTL |
| | | | DLQKLFQDMLHSIDWMDGIKAHLLS |
| | | | AEFGKHLLEVEDLLQKHKLMEADIA |
| | | | IQGDKVKAITTATLQFTEGPGYQPCD |
| | | | PQVIQDRVSHLEQCFEELSNTAAGRK |
| | | | AQLEQSKQLCKFFWEMDEAESWIKE |
| | | | KEQIYSSLDYGKDLTSVLILQRKHKA |
| | | | FEDELRGLDAHLDQIFREAEGMVAR |
| | | | KQFGHERIEVRIKKVSDQWNELKDL |
| | | | AAFCKKNLQDTENFFQFQGDADDLK |
| | | | AWLQDAHRLLSGEDVGHDEGATRA |
| | | | LGKKHKDFLEELEESRGVMEHLEQQ |
| | | | AQAFPQGFQDSPDVTNRLQALRDLY |
| | | | QQVVAQADMRQQRLQDALDLYTVF |
| | | | GETDACELWMGEKGKWLAQMEIPD |
| | | | TLEDLEVVQHRFDILDQEMKTLMTQ |
| | | | IDGVNLAANSLVESNHPRSAEVKKY |
| | | | QDRLNTRWQDFQTMVSERREAVDS |
| | | | ALRVHNYCVDCEETGKWIADKTKV |
| | | | VESTKDLGRDLAGVIAIQRKLSGLER |
| | | | DVAAIQARLGTLERESQQLMASHPE |
| | | | LKEDIEQRQAYVEELWQGLMQALKS |
| | | | QEASLGEASQLQAFLQDLDAFQAWL |
| | | | STTQKDVASKDMPESLPEAEQLLQQ |
| | | | HAAIKDDIDRHQESYQKVRVSGEKV |
| | | | THGQTDPEYLLLGQRLDGLEKGWD |
| | | | ALSRMWESRSQALTQCLGFQEFQKD |
| | | | AKQAEAILSNQEYTLAHLEPPDSLEA |
| | | | AEAGIRKFEDFLLSMENNRDKVLSPV |
| | | | DSGNKLVAEGNLYSDKIKEKVQLIE |
| | | | DRHRKNNEKAQEASDLLKDNLELQ |
| | | | NFLQNCQELTLWINDKLLTSQDVSY |
| | | | DEARNLHNKWLKHQAFVAELASHQ |
| | | | GWLENIDAEGKQLMEEKPQFAVLVS |
| | | | QKLEALHQLWDELQANTQEMAQHL |
| | | | SAARSSDLRSQTQADLNKWIRAMED |
| | | | QLQSDDLGKDLTSVNRMLAKLKRV |
| | | | EDQVNVRKEELQELFAQMPSLGEEA |
| | | | GDEALSIEKRFLDLLEPLGRRKKQLE |
| | | | SSRAKLQISRDLEDETLWVEERLPLA |
| | | | QSTDYGTNLQTVQLFMKKNQTLQN |
| | | | EILGHTPRVEDVLHRGQQLVAAAEID |
| | | | CQDVEERLGKLQGSWDTLQEAAAS |
| | | | RLQHLREASEAQQYYLDAGEAEAWI |
| | | | GEQEFYVFSDENPQDEESAIVMLKR |
| | | | HLRQQRAVDEYGRNIKQLAGRAQG |
| | | | LLSAGHPEGEQIIRLQGQVDKQYAGL |
| | | | KDMAEERRRKLENMYHLFQLKREV |
| | | | DDLEQWITEKDTVASSSEMGQDFDH |
| | | | VTVLRDKFRDFARETGAIGQERVDN |
| | | | VNAIIERLIDAGHSEAATIAEWKDGL |
| | | | NEMWADLLELIDTRMQLLAASYDL |
| | | | QRYFYTSSEILGLIGEKHRELPEDVGL |
| | | | DASTAESFHRTHTAFERELHLLGEQV |
| | | | QQFQDVAARLQTAYAGEKADIIQNK |
| | | | EQEVSAAWQALLDACAGRRTQLVD |
| | | | TADKFRFFSMARDLLSWMESIVRQIE |
| | | | TQEKPRDVSSVELLMKYHQGIQAEIE |
| | | | TRSKNFSTCLELGESLLQRQHQASEE |
| | | | IREKREQVVSRREEMQEKWEARWE |
| | | | RLRMLLEVCQFFRDASVAEAWLIAQ |
| | | | EPYLASRDYGHTVDSVEKLIKRHEAF |
| | | | EKSAASWEGRFAALEKPTTLELKER |
| | | | QTPERTEEEPGLQEEEGETAGEAPRG |
| | | | PHQATTERTSPGEEERPWPQDLQPPP |
| | | | PPGPHEDGQEEKSSTDERPATEPLFK |
| | | | VLDTPLSEGDEPTTLPAQRDRGHSVQ |
| | | | MEGFLGRKHDLEGPNKKASNRSWN |
| | | | NLYCVLRNSELAFYKDAKNLALGVP |
| | | | YHGEEPLALRHAICEIAANYKKKKH |
| | | | VFKLRLSNGSEWLFHGKDEEEMLSW |
| | | | LQGVSTAINESQSIRVKAQSLPLPPIT |
| | | | GPEASLGKKDKEKRFSFFPKKK |
| SEQ ID | E1BIS6 | Synemin/Bos | MLSWRLHTGPEKAELQELNARLYD |
| NO: 181 | (UniProtKB) | taurus | YVCRVRELERENLLLEEELRSRRGQE |
| | | | GLWAEAEARCTEEARGLRRQLDELS |
| | | | WATALAQGERDALRRELRELQLLGE |
| | | | ETRAARGRLDAELDSQRRELQEELA |
| | | | ARAALEALLGRLQAERRGLDAARER |
| | | | DVRELRARAAGLTLRYRGRVAGPA |
| | | | APPLRLRELHEDCALLVTEAWRETV |
| | | | QRYEDEVRELEEALRRGRESRREAE |
| | | | EETRLCAQEAEALRREVLELEQLRAL |
| | | | LEEELLRVREASELQAEERQREIAYL |
| | | | EDEKAALTLAMADRLRDYQDLVQV |
| | | | KTGLSLEVATYRALLEGESNPEILIVE |
| | | | CIENMPQEFREKSYQYTTSVLQKENE |
| | | | RNLFPRQKAPPASFRQSLAPRSQTPV |
| | | | RSDARRDVLGSGYSSFTTAWQENAY |
| | | | QKTASGQTNFRTFSPTPGLLRNTEAQ |
| | | | LKTFPERPRTEGTKAPPASSAKESAA |
| | | | AAEPYQERRAEEAAAASEGTWSNER |
| | | | TVIWGKKTEAKATKEQERNRPGTIQ |
| | | | TKREEKMFDSKEKASEERNLRWEEL |
| | | | TKLDKEARKRESEQMREKAREKESL |
| | | | KEESVKGREIPIRLEASQDSTAKVAP |
| | | | QDLQTPLKEDAGDGTGRGVETREAG |
| | | | FTLGASDTTASLKGGSMTETIAENIV |
| | | | SSILKQFTHSPEAEASAESFPDTKVTY |
| | | | VDRKEVPGDRKAKTEIVVESKLTEEI |
| | | | DISDEAGLDYLLSKDAKEVELKGKS |
| | | | AERLIGDVIRLGLKGKEGRAKVVNV |
| | | | EIIEEPMSYVSSEKEDEFSTPFEVEEID |
| | | | DVSPSSRGLVEEREEAVYGESDVTCS |
| | | | GDAGQEARRPQESVTHVEEVTEAGD |
| | | | LEGEQSYFVSTPDEHPGAPEREEGSV |
| | | | YGQIHIEEESTIRYSWQDEIVPGSRRR |
| | | | VRRDDVPGEKVVKPVDVPEVPLEGD |
| | | | TASAPWKEQTRSGEFHAKPIVIEKEI |
| | | | KIPHEFHTSIKEGSKEPRHQLVEVIEQ |
| | | | LEENLPERMKEELSALTREGQGGPA |
| | | | GVSFDVKKVQSAGSGAVTLVAEVNL |
| | | | SQTVDADQLDLEELSKDEAGEIEKA |
| | | | VESVVRDSLARRRSPGPGSPEAEAGG |
| | | | GFRRWATQELYSSSAGEADAGLASP |
| | | | PGPVSATVEVTSPTGFVHAHVLEDVS |
| | | | QSGGRVQIASPGMWRTEQVSAEGRA |
| | | | AQAVEVSAEGQASWAEGSAGTSRSA |
| | | | RLITLGARQSPVSTEVIFPGPDAACPE |
| | | | AGGTEEPGPAELPTEPPRFGRHSPFGS |
| | | | QQFYAQREVIFQAPVSGVGKAGDSS |
| | | | QAEESAGTQTSVKHLQLGTREGLTE |
| | | | QTQLTAPLSGAVELGVREASVLMEA |
| | | | WSGDGTSIRHVTIGPQRHQATEPIVP |
| | | | PPLEFSDSESSTHREGSADETLATSSY |
| | | | TVGRNILVTEKSTFQRAVSESPQEAS |
| | | | AEDMSGNEVTSGVSRSFRHIQLGPAE |
| | | | AKTSEHIVFHGPISKTFALAGSVDSPE |
| | | | VSEVADSGRTLRHVALGPKETSFTFQ |
| | | | MDVSNVEATSRWTQEARVLFPAGTE |
| | | | AEAPSVSEPGAWRDASSRNDLAAGV |
| | | | SFQGSAGDRHQAPGERGKEQAEFDK |
| | | | TVQLQRMVDQRSVISDEKKVALLYL |
| | | | DSQEEENEGHWF |
| SEQ ID | E1BF59 | Plectin/Bos | MVAGMFMPLDQLRAIYEVLFREGV |
| NO: 182 | (UniProtKB) | taurus | MVAKKDRRPRSLHPHVPGVTNLQV |
| | | | MRAMASLRARGLVRETFAWRHFYW |
| | | | YLTNEGIAHLRQYLHLPPEIVPASLQ |
| | | | RVRRPVAMVMPARRTPHVQAVQGP |
| | | | LGCPPKRGPPPTEDPAREERCVYRRK |
| | | | EPEEGAPEPPVVPAATPGTLARQGLE |
| | | | PAPPTDERDRVQKKTFTKWVNKHLI |
| | | | KAQRHISDLYEDLRDGHNLISLLEVL |
| | | | SGDSLPREKGRMRFHKLQNVQIALD |
| | | | YLRHRQVKLVNIRNDDIADGNPKLT |
| | | | LGLIWTIILHFQISDIQVSGQSEDMTA |
| | | | KEKLLLWSQRMVEGYQGLRCDNFT |
| | | | SSWRDGRLFNAIIHRHKPMLIDMNK |
| | | | VYRQTNLENLDQAFSVAERDLGVTR |
| | | | LLDPEDVDVPQPDEKSIITYVSSLYD |
| | | | AMPRVPDVQDGVKANELQLRWQEY |
| | | | RELVLLLLQWIRAHTAAFEERRFPSS |
| | | | FEEIEILWCQFLKFKETELPAKEADK |
| | | | NRSKGIYQSLEGAVQAGQLKVPPGY |
| | | | HPLDVEKEWGKLHVAILEREKQLRS |
| | | | EFERLERLQRIVSKLQMEAGLCEEQL |
| | | | NQADALLQSQDVRLLAAGKAPQRA |
| | | | GEVERDLDKADGMIRLLFNDVQALK |
| | | | DGRHPQGEQMYRRVYRLHERLVAIR |
| | | | TEYNLRLRGTPRHPELEDSTLRYLQD |
| | | | LLAWVEENQRRLDGAEWGVDLPSV |
| | | | EAQLGSHRGLHQSVEEFRAKIERART |
| | | | DEGQLSPATRGAYRDCLGRLDLQYA |
| | | | KLLNSSKARLRSLESLHGFVAAATKE |
| | | | LMWLSEKEEEEVGFDWSERNSNMA |
| | | | AKKEAYSALMRELELKEKKIKEIQST |
| | | | GDRLLREDHPARPTVESFQAALQTQ |
| | | | WSWMLQLCCCIEAHLKENTAYFQFF |
| | | | SDVREAEEQLRKLQETLHRKYTCDR |
| | | | SITVTRLEDLLQDAQDEKDQLNEYR |
| | | | GHLSGLAKRAKAIVQLTPRNPTQPTR |
| | | | GRVPLLAVCDYKQVEATVHKGDEC |
| | | | QMLGPAQPFHWKVLSGSGSEAAVPS |
| | | | VCFLVPPPNQEALEAVARLEAQHQA |
| | | | LVTLWHQLHTDMKSLLAWQSLSRD |
| | | | VQLIRSWSLVTFRTLKPEEQRQALRS |
| | | | LELHYQAFLRDSQDAGGFGPEDRLQ |
| | | | AEREYGSCSRHYQQLLQSLEQGKCG |
| | | | QCGXLDKEPARECAQRIAEQQKAQA |
| | | | EVEGLGKGVARLSAEAEKVLALPEP |
| | | | SPAAPTLRSELELTLGKLEQVRSLSAI |
| | | | YLEKLKTISLVIRSTQGAEEALKAHE |
| | | | EQLKEAQAVPAALPELEATKAAMK |
| | | | KLRAQAEAQQPVFDALRDELRGAQE |
| | | | VGERLQQRHGERDVEVERWRERVT |
| | | | QLLERWQAVLAQTDVRQRELEQLG |
| | | | RQLRYYRESADPLGAWLQDARRRQ |
| | | | EQIQAVPLADSQAVREQLRQEKALL |
| | | | EEIERHAEKVEECQRFAKQYINAIKD |
| | | | YELQLVTYKAQLEPVASPAKKPKVQ |
| | | | SGSESVIQEYVDLRTRYSELSTLTSQ |
| | | | YIRFISETLRRMEEEERLAEQQRAEE |
| | | | RERLAEVEAALEKQRQLAEAHAQA |
| | | | KAQAEREAQELQRRMQEEVARREE |
| | | | VVVDAQQQKRSIQEELQQLRQSSEA |
| | | | EIQAKARQVEAAERSRLRIEEEIRVV |
| | | | RLQLETTERQRGGAEGELQALRARA |
| | | | EEAEAQKRQAQEEAERLRRQVQDET |
| | | | QRKRQAEAELGLRVKAEAEAAREK |
| | | | QRALQALEELRLQAEEAERRLRQAE |
| | | | AERARQVQVALETAQRSAQAELQSK |
| | | | HASFAEKTAQLERTLEEEHVTVVQL |
| | | | REEATRREQQQAEAERAREEAEREL |
| | | | ERWQLKANEALRLRLQAEEVAQQK |
| | | | SLAQAEAEKQKEAAEREARRRGKAE |
| | | | EQAVRQRELAEQELERQRQLAEGTA |
| | | | QQRLAAEQELIRLRAETEQGEQQRQ |
| | | | LLEEELARLQSEAAAATQKRQELEA |
| | | | ELAKVRAEMEVLLASKARAEEESRS |
| | | | SSEKSKQRLEAEAGRFRELAEEAARL |
| | | | RALAEEAKRQRQLAEEDAARQRAE |
| | | | AERVLSEKLAAISEATRLKTEAEIAL |
| | | | KEKEAENERLRRLAEDEAFQRRRLE |
| | | | EQAAQHKADIEERLAQLRKASESELE |
| | | | RQKGLVEDTLRQRRQVEEEILALKA |
| | | | SFEKAAAGKAELELELGRIRGNAEDT |
| | | | LRSKEQAEQEAARQRQLAAEEERRR |
| | | | REAEERVQKSLAAEEEAARQRKAAL |
| | | | EEVERLKAKVEEARRLRERAEQESA |
| | | | RQLQLAQEAAQKRLQAEEKAHAFA |
| | | | VQQKEQELQQTLQQEQSMLERLRGE |
| | | | AEAARRAAEEAEEARERAEGEAAQS |
| | | | RQRVEEAERLKQAAEEQAQAQAQA |
| | | | QAAAEKLRKEAEQEAARRAQAEQA |
| | | | ALRQKQAADAEMEKHKKFAEQTLR |
| | | | QKAQVEQELTALRLKLEETDHQKSIL |
| | | | DQELQRLKAEVTEAARQRSQVEEEL |
| | | | FSVRVQMEELGKLKARIEAENRALIL |
| | | | RDKDNTQRLLQEEAEKMKQVAEEA |
| | | | ARLSVAAQEAARLRQLAEEDLAQQR |
| | | | ALAEKMLKEKMQAVQEATRLKAEA |
| | | | ELLQQQKELAQEQARRLQEDKEQM |
| | | | AQQLAQETQGFQRTLETERQRQLEM |
| | | | SAEAERLRLRVAEMSRAQARAEEDA |
| | | | QRFRKQAEEISAKLHRTELATQEKVT |
| | | | LVQTLETQRQQSDRDADRLREAIAE |
| | | | LEREKDKLKKEAELLQLKSEEMQTV |
| | | | QQEQLLQETQALQQSFLSEKDSLLQR |
| | | | ERFIEEEKAKLERLFQDEVAKAQKLR |
| | | | EEQQRQQQQMQQEKQQLLASMEEA |
| | | | RRRQREAEEGVRRKQEELQLLEQQR |
| | | | QQQEQLLAEENRRLRERLEHLEEEH |
| | | | RAALAHSEEITAAQAAATRALPNGQ |
| | | | DATDGPAAEPEHAFEGLRQKVPAQQ |
| | | | LQEAGILSTEEVQRLVQGHTTVAELT |
| | | | QREDVRRYLQGHSSIAGLLLKPANE |
| | | | KLTIYAALRRQLLSPGTAVILLEAQA |
| | | | ASGFLLDPVRNRRLTVNEAVKEGVV |
| | | | GPELHHKLLSAERAVTGYKDPYTGE |
| | | | QISLFQAMKKDLIVREHGIRLLEAQI |
| | | | ATGGVIDPVHSHRVPVDVAYQRGYF |
| | | | DEEMNRVLQDPSDDTKGFFDPNTHE |
| | | | NLTYLQLLERCVEDPETGLRLLPLTD |
| | | | QAAKGGELVYTDSEARDVFEKATVS |
| | | | APFGKFQGKTVTIWELINSEYFTAEQ |
| | | | RRDLLRQFRTGKVTVEKIIKIVITVIE |
| | | | EHEQKGQLCFQGLRALVPAAELLES |
| | | | GVIDWDLFRQLQLGERSVQEVAEVE |
| | | | AVRRALRGSGVIAGVWLEEARQKLS |
| | | | IYEALKKELLQPEAAVALLEAQAGT |
| | | | GHVIDPATSARLTVDEAVRAGLVGP |
| | | | ELHEKLLSAEKAVTGYKDPYSGQSV |
| | | | SLFQALKKGLIPREQGLRLLDAQLST |
| | | | GGIVDPSKSHRLPLDVACARGYLDK |
| | | | ETSTALTAPRDDAKTYYNPRTWEPA |
| | | | TYSQLQQQCRPDPLTGLSLLPLSEEA |
| | | | ARARQQELYSEVQAREAFQKATVEV |
| | | | PVGSFQGRAVTIWELINSEYFTAEQR |
| | | | QELLRQFRTGKVTVEKIIKIIITIVEEV |
| | | | ETTRRERLSFSGLRAPVPASELLASGI |
| | | | LSSSQFEQLKDGKTSVKDLSELDSVR |
| | | | TLLQGSGCLAGIYLEESKEKVTIYEA |
| | | | MRRGLLRPSTAILLLEAQAATGFLVD |
| | | | PVRNQRLYVHEAVKAGVVGPELHE |
| | | | KLLSAEKAVTGYKDPYSGSTISLFQA |
| | | | MKKGLVVREHGIRLLEAQIATGGIID |
| | | | PVHSHRVPVDVAYQRGYFDKEMNR |
| | | | VLEDPSDDTKGFFDPNTRENLTYRQL |
| | | | LERCVEDPETGLRLLPLKGPEKAEVV |
| | | | ETTRVYTEEETRRAFEETQIDIPGGGS |
| | | | HGGSTMSLWEVMQSDLIPEEQRAQL |
| | | | MADFQAGRVTKERMIIIIIEIIEKTEIV |
| | | | RQQNLASYDYVRRRLTAEDLHEARV |
| | | | ISRESYSLLREGTRSLREVLEAESAW |
| | | | RYLYGTGCVAGVYLPGSRQTLTIYQ |
| | | | ALKKGLLSAEVARLLLEAQAATGFL |
| | | | LDPVKGDRLTVDEAVRKGLVGPELH |
| | | | DRLLSAERAVTGYRDPYTEQTISLFQ |
| | | | AMKKDLIPAEEALRLLDAQLATGGI |
| | | | VDPRLGFHLPLEVAYQRGYLNKDTH |
| | | | DQLSEPSEVRSYIDPSTDERLSYTQLL |
| | | | RRCRRDEASGLFLLPLSDARKLTFRG |
| | | | LRKQITVEELVRSHVMDEATAQRLQ |
| | | | EGLTSIEEVSKNLQKFLEGTSSIAGVL |
| | | | VDATKERLSVYQAMKKGIIRPGTAF |
| | | | ELLEAQAATGYVIDPIKGLKLTVEEA |
| | | | VRMGIVGPEFKDKLLSAERAVTGYK |
| | | | DPYSGKLISLFQAMKKGLILKDHGIR |
| | | | LLEAQIATGGIIDPEESHRLPVDVAY |
| | | | QRGLFDEEMNEILTDPSDDTKGFFDP |
| | | | NTEENLTYLQLMERCVTDPQTGLRL |
| | | | LPLKEKKRERKTSSKSSVRKRRVVIV |
| | | | DPETGKEMSVYEAYRKGLIDHQTYL |
| | | | ELSEQECEWEEITISSSDGVVKSMIID |
| | | | RRSGRQYDIDEAIAKSLIDRSALDQY |
| | | | RAGTLSITEFADMLSGNAGGFRSRSS |
| | | | SVGSSSSYPISPAVSRTQLASWSDPTE |
| | | | ETGPVAGILDTETLEKVSITEAMHRN |
| | | | LVDNITGQRLLEAQACTGGIIDPNTG |
| | | | ERFPVTEAVNKGLVDKIMVDRINLA |
| | | | QKAFCGFEDPRTKTKMSAAQALKK |
| | | | GWLYYEAGQRFLEVQYLTGGLIEPD |
| | | | TPGRVPLDEALQRGTVDARTAQKLR |
| | | | DVSAYSKYLTCPKTKLKISYKDALD |
| | | | RSMVEEGTGLRLLEAATQSSKGYYS |
| | | | PYSVSGSGSTTGSRSGSRTGSRAGSR |
| | | | RGSFDATGSGFSMTFSSSSYSSSGYG |
| | | | RRYASGPTSSLGGPESTAA |
| SEQ ID | Q63258-2 | Integrin alpha-7 | MARIPRCDFLGLPGICYLLSFLLAGLL |
| NO: 183 | (UniProtKB) | Isoform Alpha- | LPRASAFNLDVMGAIRKEGEPGSLFG |
| | | 7X1A/Rattus | FSVALHRQLQPRPQSWLLVGAPQAL |
| | | norvegicus | ALPGQQANRTGGLFACPLSLEETDC |
| | | | YRVDIDRGANVQKESKENQWLGVS |
| | | | VRSQGAGGKVVTCAHRYESRQRVD |
| | | | QVLETRDVIGRCFVLSQDLAIRDELD |
| | | | GGEWKFCEGRPQGHEQFGFCQQGT |
| | | | AATFSPDSHYLIFGAPGTYNWKGLLF |
| | | | VTNIDSSDPDQLVYKTLDPADRLTGP |
| | | | AGDLTLNSYLGFSIDSGKGLMRSEEL |
| | | | SFVAGAPRANHKGAVVILRKDSASR |
| | | | LIPEVVLSGERLTSGFGYSLAVTDLN |
| | | | SDGWADLIVGAPYFFERQEELGGAV |
| | | | YVYMNQGGHWADISPLRLCGSPDS |
| | | | MFGISLAVLGDLNQDGFPDIAVGAPF |
| | | | DGDGKVFIYHGSSLGVVTKPSQVLE |
| | | | GEAVGIKSFGYSLSGGLDVDGNHYP |
| | | | DLLVGSLADTAALFRARPVLHVSQEI |
| | | | FIDPRAIDLEQPNCADGRLVCVHVKV |
| | | | CFSYVAVPSSYSPIVVLDYVLDGDTD |
| | | | RRLRGQAPRVTFPGRGPDDLKHQSS |
| | | | GTVSLKHQHDRVCGDTVFQLQENV |
| | | | KDKLRAIVVTLSYGLQTPRLRRQAP |
| | | | DQGLPLVAPILNAHQPSTQRTEIHFL |
| | | | KQGCGDDKICQSNLQLAQAQFCSRIS |
| | | | DTEFQALPMDLDGTALFALSGQPFIG |
| | | | LELTVTNLPSDPARPQADGDDAHEA |
| | | | QLLATLPASLRYSGVRTLDSVEKPLC |
| | | | LSNENASHVECELGNPMKRGTQVTF |
| | | | YLILSTSGITIETTELKVELLLATISEQ |
| | | | DLHPVSVRAHVFIELPLSISGVATPQQ |
| | | | LFFSGKVKGESAMRSERDVGSKVKY |
| | | | EVTVSNQGQSLNTLGSAFLNIMWPH |
| | | | EIANGKWLLYPMRVELEGGQGPEKK |
| | | | GICSPRPNILHLDVDSRDRRRRELGQ |
| | | | PEPQEPPEKVEPSTSWWPVSSAEKRN |
| | | | VTLDCAQGTAKCVVFSCPLYSFDRA |
| | | | AVLHVWGRLWNSTFLEEYMSVKSL |
| | | | EVIVRANITVKSSIKNLLLRDASTVIP |
| | | | VMVYLDPVAVVAEGVPWWVILLAV |
| | | | LAGLLVLALLVLLLWKCGFFRRNSP |
| | | | SSSFPANYHRAHLAVQPSAMEAGGP |
| | | | GTVGWDSSSGRSTLRPLYPSTTQ |
| SEQ ID | A0A140T8D2 | Integrin | MNLQLIFWIGLISSVCCVFGQADENR |
| NO: 184 | (UniProtKB) | beta/Bos taurus | CLKANAKSCGECIQAGPNCGWCTNS |
| | | | TFLQEGMPTSARCDDLEALKKKGCH |
| | | | PNDIENPRGSKDIKKNKNVTNRSKGT |
| | | | AEKLQPEDITQIQPQQLVLQLRSGEP |
| | | | QTFTLKFKRAEDYPIDLYYLMDLSYS |
| | | | MKDDLENVKSLGTDLMNEMRRITSD |
| | | | FRIGFGSFVEKTVMPYISTTPAKLRNP |
| | | | CTNEQNCTSPFSYKNVLSLTDKGEVF |
| | | | NELVGKQRISGNLDSPEGGFDAIMQ |
| | | | VAVCGSLIGWRNVTRLLVFSTDAGF |
| | | | HFAGDGKLGGIVLPNDGQCHLENDV |
| | | | YTMSHYYDYPSIAHLVQKLSENNIQT |
| | | | IFAVTEEFQPVYKELKNLIPKSAVGT |
| | | | LSANSSNVIQLIIDAYNSLSSEVILENS |
| | | | KLPEGVTINYKSYCKNGVNGTGENG |
| | | | RKCSNISIGDEVQFEISITANKCPNKN |
| | | | SETIKIKPLGFTEEVEIILQFICECECQ |
| | | | GEGIPGSPKCHDGNGTFECGACRCN |
| | | | EGRVGRHCECSTDEVNSEDMDAYC |
| | | | RKENSSEICSNNGECVCGQCVCRKR |
| | | | DNTNEIYSGKFCECDNFNCDRSNGLI |
| | | | CGGNGVCKCRVCECNPNYTGSACD |
| | | | CSLDTTSCMAVNGQICNGRGVCECG |
| | | | ACKCTDPKFQGPTCEMCQTCLGVCA |
| | | | EHKECVQCRAFNKGEKKDTCAQECS |
| | | | HFNITKVENRDKLPQPGQVDPLSHC |
| | | | KEKDVDDCWFYFTYSVNGNNEATV |
| | | | HVVETPECPTGPDIIPIVAGVVAGIVL |
| | | | IGLALLLIWKLLMIIHDRREFAKFEKE |
| | | | KMNAKWDTQENPIYKSPINNFKNPN |
| | | | YGRKAGL |
| SEQ ID | P07228 | Integrin beta- | MAETNLTLLTWAGILCCLIWSGSAQ |
| NO: 185 | (UniProtKB) | 1/Gallus gallus | QGGSDCIKANAKSCGECIQAGPNCG |
| | | | WCKKTDFLQEGEPTSARCDDLAALK |
| | | | SKGCPEQDIENPRGSKRVLEDREVTN |
| | | | RKIGAAEKLKPEAITQIQPQKLVLQL |
| | | | RVGEPQTFSLKFKRAEDYPIDLYYLM |
| | | | DLSYSMKDDLENVKSLGTALMREM |
| | | | EKITSDFRIGFGSFVEKTVMPYISTTP |
| | | | AKLRNPCTGDQNCTSPFSYKNVLSLT |
| | | | SEGNKFNELVGKQHISGNLDSPEGGF |
| | | | DAIMQVAVCGDQIGWRNVTRLLVFS |
| | | | TDAGFHFAGDGKLGGIVLPNDGKCH |
| | | | LENNMYTMSHYYDYPSIAHLVQKLS |
| | | | ENNIQTIFAVTEEFQAVYKELKNLIPK |
| | | | SAVGTLSSNSSNVIQLIIDAYNSLSSE |
| | | | VILENSKLPKEVTISYKSYCKNGVND |
| | | | TQEDGRKCSNISIGDEVRFEINVTAN |
| | | | ECPKKGQNETIKIKPLGFTEEVEIHLQ |
| | | | FICDCLCQSEGEPNSPACHDGNGTFE |
| | | | CGACRCNEGRIGRLCECSTDEVNSED |
| | | | MDAYCRRENSTEICSNNGECICGQC |
| | | | VCKKRENTNEVYSGKYCECDNFNC |
| | | | DRSNGLICGGNGICKCRVCECFPNFT |
| | | | GSACDCSLDTTPCMAGNGQICNGRG |
| | | | TCECGTCNCTDPKFQGPTCEMCQTC |
| | | | LGVCAEHKDCVQCRAFEKGEKKETC |
| | | | SQECMHFNMTRVESRGKLPQPVHPD |
| | | | PLSHCKEKDVGDCWFYFTYSVNSNG |
| | | | EASVHVVETPECPSGPDIIPIVAGVVA |
| | | | GIVLIGLALLLIWKLLMIIHDRREFAK |
| | | | FEKEKMNAKWDTGENPIYKSAVTTV |
| | | | VNPKYEGK |
| SEQ ID | Q9GLP0 | Integrin beta- | MNLQLIFWIGLISSVCYVFGQADENR |
| NO: 186 | (UniProtKB) | 1/Sus scrofa | CLKANAKSCGECIQAGPNCGWCTNS |
| | | | TFLQEGMPTSARCDDLEALRKKGCH |
| | | | PDDIENPRGSKNIKKNKNVTNRSKGT |
| | | | AEKLQPEDITQIQPQQLVLQLRSGEP |
| | | | QTFTLKFKRAEDYPIDLYYLMDLSYS |
| | | | MKDDLENVKSLGTDLMNEMRRITSD |
| | | | FRIGFGSFVEKTVMPYISTTPAKLRNP |
| | | | CTSEQNCTSPFSYKNVLSLTDKGEVF |
| | | | NELVGKQRISGNLDSPEGGFDAIMQ |
| | | | VAVCGSLIGWRNVTRLLVFSTDAGF |
| | | | HFAGDGKLGGIVLPNDGHCHLENDV |
| | | | YTMSHYYDYPSIAHLVQKLSENNIQT |
| | | | IFAVTEEFQPVYKELKNLIPKSAVGT |
| | | | LSANSSNVIQLIIDAYNSLSSEVILENS |
| | | | KLPEGVTINYKSYCKNGVNGTGENG |
| | | | RKCSNISIGDEVQFEISITANKCPNKN |
| | | | SETIKIKPLGFTEEVEIILQFICECECQS |
| | | | EGIPSSPKCHDGNGTFECGACRCNEG |
| | | | RVGRHCECSTDEVNSEDMDAYCRK |
| | | | ENSSEICTNNGECVCGQCVCRKRDN |
| | | | TNEIYSGKFCECDNFNCDRSNGLICG |
| | | | GNGVCKCRVCECNPNYTGSACDCSL |
| | | | DTTSCMAVNGQICNGRGVCECGVC |
| | | | KCTDPKFQGPTCEMCQTCLGVCAEH |
| | | | KECVQCRAFNKGEKKDTCAQECSHF |
| | | | NITKVENRDKLPQPGQVDPLSHCKE |
| | | | KDVDDCWFYFTYSVNGNNEATVHV |
| | | | VETPECPTGPDIIPIVAGVVAGIVLIGL |
| | | | ALLLIWKLLMIIHDRREFAKFEKEKM |
| | | | NAKWDTGENPIYKSAVTTVVNPKYE |
| | | | GK |
| SEQ ID | F1MX12 | Ankyrin repeat | WQKHLAGRGWGPWHIKPPGPAEAG |
| NO: 187 | (UniProtKB) | domain 2/Bos | CDGTMADSEEVQRATALIEERLAQE |
| | | taurus | EENEKLRGTTHQKLPMEMLVLEDEK |
| | | | HHRPESPSLQKVKGQERVRKTSLDL |
| | | | RREIIDVGGIQNLIQLRKKRKQKKRE |
| | | | ALAASQEPPPEPEEITGPVDEETFLKA |
| | | | AVEGKMKVIEKFLADGGSPDTCDQF |
| | | | RRTALHRASLEGHMEILEKLLESGAT |
| | | | VDFQDRLDCTAMHWACRGGHLEVV |
| | | | RLLQSRGADTNVRDKLLSTPLHVAV |
| | | | RTGQVEIVEHFLSLGLDINAKDREGD |
| | | | SALHDAVRLNRYKIIKLLLLHGADM |
| | | | MSKNLAGKTPTDLVQLWQADTRHA |
| | | | LENPEPGSEQNGLEGSTESGRETPQP |
| | | | VAAE |
| SEQ ID | F1NG08 | Ankyrin | MAAPAPPAPGGGTSPPAGPPRLRQSD |
| NO: 188 | (UniProtKB) | 2/Gallus gallus | SNASFLRAARAGNLDKVVEYLKSGI |
| | | | DINTCNQNGLNALHLAAKEGHVGLV |
| | | | QELLERGSAVDSATKKGNTALHIASL |
| | | | AGQAEVVKVLVKEGANINAQSQNG |
| | | | FTPLYMAAQENHIEVVKYLLENGAN |
| | | | QSTATEDGFTPLAVALQQGHNQAVA |
| | | | ILLENDTKGKVRLPALHIAARKDDTK |
| | | | SAALLLQNDHNADVQSKMMVNRTT |
| | | | ESGFTPLHIAAHYGNVNVATLLLNR |
| | | | GAAVDFTARNGITPLHVASKRGNTN |
| | | | MVKLLLDRGGQIDAKTRDGLTPLHC |
| | | | AARSGHDQVVELLLERGAPLLARTK |
| | | | NGLSPLHMAAQGDHVECVKHLLQH |
| | | | KAPVDDVTLDYLTALHVAAHCGHY |
| | | | RVTKLLLDKRANPNARALNGFTPLHI |
| | | | ACKKNRIKVMELLVKYGASIQAITES |
| | | | GLTPIHVAAFMGHLNIVLLLLQNGAS |
| | | | PDVTNIRGETALHMAARAGQVEVVR |
| | | | CLLRNGALVDARAREEQTPLHIASRL |
| | | | GKTEIVQLLLQHMAHPDAATTNGYT |
| | | | PLHISAREGQVDVASVLLEAGASHS |
| | | | MSTKKGFTPLHVAAKYGSLEVAKLL |
| | | | LQRRASPDSAGKNGLTPLHVAAHYD |
| | | | NQKVALLLLEKGASPHATAKNGYTP |
| | | | LHIAAKKNQMQIATTLLNYGAETNIL |
| | | | TKQGVTPLHLASQGGHTDMVTLLLE |
| | | | KGSNIHVATKTGLTSLHLAAQEDKV |
| | | | NVAEILTKHGANQDAQTKLGYTPLI |
| | | | VACHYGNIKMVNFLLKQGANVNAK |
| | | | TKNGYTPLHQAAQQGHTHIINVLLQ |
| | | | HGAKPNAITTNGNTALAIARRLGYIS |
| | | | VVDTLKVVTEEITTTTTTVTEKHKLN |
| | | | VPETMTEVLDVSDEEAFKHSDDERF |
| | | | SDGEVYNGTGVISRNSWSDDTMTGD |
| | | | GGEYLRPEDLKELGDDSLPSSQFLDG |
| | | | MNYLRYSLEGGRSDSLRSFSSDRSHT |
| | | | LSHASYLRDSAMIDDTVVIPSQQVTT |
| | | | LAKEAERNSYRLSWGPENLDNVALS |
| | | | SSPIHSGCSSPCLDHDNSSFLVSFMVD |
| | | | ARGGAMRGCRHNGLRIIIPPRKCTAP |
| | | | TRVTCRLVKRHRLATMPPMVEGEGL |
| | | | ASRLIEVGPSGAQFLGPVIVEIPHFAA |
| | | | LRGKERELVILRSENGDSWKEHFCE |
| | | | YTEDELNEILNGMDEVLDTPEELEKK |
| | | | RICRIITRDFPQYFAVVSRIKQDSNLIG |
| | | | PEGGVLSSTVVPQVQAVFPEGALTK |
| | | | RIRVGLQAQPMHTELIKKILGNKATF |
| | | | SPIVTLEPRRRKFHKPITMTIPVPKAS |
| | | | SDGIMNGYGGDTPTLRLLCSITGGTT |
| | | | PAQWEDITGTTPLTFVNECVSFTTNV |
| | | | SARFWLIDCRQTQESVTFASQVYREII |
| | | | CVPYMAKFVVFAKSHDPIEARLRCF |
| | | | CMTDDKVDKTLEQQENFAEVARSR |
| | | | DVEVLEGKPIYVDCFGNLVPLTKSG |
| | | | QHHIFSFFAFKENRLPLFVKVRDTTQ |
| | | | EPCGRLSFMKEPKSTRGLVHQAICNL |
| | | | NITLPVYTKESESDQEQEEEVDMTSE |
| | | | KNQQDDRERTEERLAHIADHLGFSW |
| | | | TELARELDFTEEQIHQIRIENPNSLQD |
| | | | QSHALLKYWLERDGKHATDTSLTQC |
| | | | LTKINRMDIVHLMETSGIDSMQVHG |
| | | | TRTYTEIEQTIGLDHSEGFSVLQEELY |
| | | | SSRHKPDERHRISKDGDPTEHPPIVSE |
| | | | EDVSVSYSPFQDSTPRSEAELSMAEL |
| | | | LRQTHKEQVEAEFSGKPQDVIETTSS |
| | | | QHEYFVTTPGTEQRAASDTSARFSAT |
| | | | KEEREKTSPQSPSSAQRGGSPIIQEPE |
| | | | ELHLHQDDPSPRRTSLVIVESIDEQPE |
| | | | KLGSGYEEESLEKELAEELGELENSS |
| | | | DEDEMVTTRVVRRRVIIQADSMPEM |
| | | | PPETVTEEQYTDEHGHTVVKKVTRK |
| | | | IIRRYVSPDGTEKEDIIMQGTPQKPVT |
| | | | VEEGDGYSKVVKRVVLKSDSEQSEV |
| | | | TLSEPGVLPSASNFQSEPVEGRKVSK |
| | | | VIKTTVVQGERMEKHLGDASLATDL |
| | | | PSAKEDFEEALSYTGNQIKIQLPALV |
| | | | EKEIMKEDGSIIKRTTLSKASTQKRT |
| | | | VMKDRYGKHVHIEELDDTPEALPQD |
| | | | DLQHDLQQLLRHFCKEDWKQEAK |
| SEQ ID | A0A287AUI5 | Ankyrin 2/Sus | EGQSQDKGSKSGSSIQSLFFFSQSDSN |
| NO: 189 | (UniProtKB) | scrofa | ASFLRAARAGNLDKVVEYLKGGIDI |
| | | | NTCNQNGLNALHLAAKEGHVGLVQ |
| | | | ELLGRGSSVDSATKKGNTALHIASLA |
| | | | GQAEVVKVLVKEGANINAQSQNGFT |
| | | | PLYMAAQENHIDVVKYLLENGANQS |
| | | | TATEDGFTPLAVALQQGHNQAVAIL |
| | | | LENDTKGKVRLPALHIAARKDDTKS |
| | | | AALLLQNDHNADVQSKMMVNRTTE |
| | | | SGFTPLHIAAHYGNVNVATLLLNRG |
| | | | AAVDFTARNGITPLHVASKRGNTNM |
| | | | VKLLLDRGGQIDAKTRDGLTPLHCA |
| | | | ARSGHDQVVELLLERGAPLLARTKN |
| | | | GLSPLHMAAQGDHVECVKHLLQHK |
| | | | APVDDVTLDYLTALHVAAHCGHYR |
| | | | VTKLLLDKRANPNARALNGFTPLHI |
| | | | ACKKNRIKVMELLVKYGASIQAITES |
| | | | GLTPIHVAAFMGHLNIVLLLLQNGAS |
| | | | PDVTNIRGETALHMAARAGQVEVVR |
| | | | CLLRNGALVDARAREEQTPLHIASRL |
| | | | GKTEIVQLLLQHMAHPDAATTNGYT |
| | | | PLHISAREGQVDVASVLLEAGAAHS |
| | | | LATKKGFTPLHVAAKYGSLDVAKLL |
| | | | LQRRAAADSAGKNGLTPLHVAAHY |
| | | | DNQKVALLLLEKGASPHATAKNGYT |
| | | | PLHIAAKKNQMQIASTLLNYGAETNI |
| | | | VTKQGVTPLHLASQEGHTDMVTLLL |
| | | | DKGANIHMSTKSGLTSLHLAAQEDK |
| | | | VNVADILTKHGADQDAHTKLGYTPL |
| | | | IVACHYGNVKMVNFLLKQGANVNA |
| | | | KTKNGYTPLHQAAQQGHTHIINVLL |
| | | | QHGAKPNATTANGNTALAIAKRLGY |
| | | | ISVVDTLKVVTEEVTTTTTTITEKHK |
| | | | LNVPETMTEVLDVSDEEGDDTMTGD |
| | | | GGEYLRPEDLKELGDDSLPSSQFLDG |
| | | | MNYLRYSLEGGRSDSLRSFSSDRSHT |
| | | | LSHASYLRDSAMIDDTVVIPSHQVSA |
| | | | LAKEAERNSYRLSWGTENLDNVALS |
| | | | SSPIHSGFLVSFMVDARGGAMRGCR |
| | | | HNGLRIIIPPRKCTAPTRVTCRLVKRH |
| | | | RLATMPPMVEGEGLASRLIEVGPSG |
| | | | AQFLGKLHLPTAPPPLNEGESLVSRIL |
| | | | QLGPPGTKFLGPVIVEIPHFAALRGK |
| | | | ERELVVLRSENGDSWKEHYCEYTED |
| | | | ELNEILNGMDEVLDSPEDLEKKRICR |
| | | | IITRDFPQYFAVVSRIKQDSNLIGPEG |
| | | | GVQAVFPEGALTKRIRVGLQAQPMH |
| | | | SELVKKILGNKATFSPIVTLEPRRRKF |
| | | | HKPITMTIPVPKASSDVMLNGFGGD |
| | | | APTLRLLCSITGGTTPAQWEDITGTTP |
| | | | LTFVNECVSFTTNVSARFWLIDCRQI |
| | | | QESVTFASQVYREIICVPYMAKFVVF |
| | | | AKSHDPIEARLRCFCMTDDKVDKTL |
| | | | EQQENFAEVARSRDVEVLEGKPIYV |
| | | | DCFGNLVPLTKSGQHHIFSFFAFKEN |
| | | | RLPLFVKVRDSTQEPCGRLSFMKEPK |
| | | | STRGLVHQAICNLNITLPIYTKESESD |
| | | | QEQEEEVIVRHYDETESTETSVLKSH |
| | | | LVNEVPVLASPDLLSEVSEMKQDLIK |
| | | | MTAILTTDVSDRAGSLKVKELVKAA |
| | | | EEEPGEPFEIVERVKEDLEKVNEILRS |
| | | | GTCAGDEGSEPRSQPEREVVEEEWVI |
| | | | VSDEEIEEAKRKAPLEITEYPCVEVRL |
| | | | DKDTKVKVEKDSLGLVNYLTEDLNS |
| | | | YVPPHGEPLQMEREKQEALGPGRSS |
| | | | ESEGKDAPSEETQSTQKQPKPSLGIK |
| | | | KPVRRKLKDKQKQKEDSSQASADKS |
| | | | ELKKGSSEESLDEDTGLAPEPLPAVK |
| | | | ATSPLIEETPIGSIKDKVKALQKRVED |
| | | | EQKGRSKLPVRVKGKEDVPKKITHR |
| | | | TQLAASPSLKSERHALASKPERHSSL |
| | | | SSPAKTERHPPVSPSSKTEKHSPVSPS |
| | | | AKTERHSPVSSSSKTEKHSPVSPSTKP |
| | | | DRHSPVSSATKTERHPPVSPSGKTDK |
| | | | RPPVSPSGRTEKHPPVSPGRTEKRLP |
| | | | VSPAGRMERHSPMSTSGKTEKHLPV |
| | | | SPSGKTDKQPPVSPTSKTERIEETMSV |
| | | | RELMKAFQSGQDPSKHKTGLFEHKS |
| | | | AKQKQPQEKGKVRGEKEKGLTVTQ |
| | | | KETQKTETQTIKRSQRFLVTGPQNPE |
| | | | EQPVVKREEGAGERGKALNHKTPEP |
| | | | VQSAPEEESHKVESPKEKLADEQGD |
| | | | MDLQISPDRKTSTDFSDVIKQELEDN |
| | | | DKYQEFCHNQVLTSPFNTTFPLDYM |
| | | | KEEFLPALSLQSGALDGSSESLKHEG |
| | | | AAGSPCGSLMEGTPQISSEESYKHEG |
| | | | LAETPETSPESLSFSPKKTEEQTEETK |
| | | | ETTKVESPPEIHSEKEDPSTKDVTDSS |
| | | | AGQGAVVTGGTEPSAECLLKEATLE |
| | | | PSKDTCPQPEDEGLDSQGESLAKETP |
| | | | KGLTEGVPHGEDPLTHVSSAHEKQT |
| | | | DTEAQKSTASKPSDETAASPLPDAVV |
| | | | KTSPGTESKPQGVIRSPQGLELALPSR |
| | | | DSEVFSPGADESFAVSHKDSLEASPV |
| | | | LEDNSSHKTPDSLEPSPLKESPCRDSL |
| | | | ESSPVEPKMKAGILPSQFPLPSAVAK |
| | | | TELITEVASMRSRLLRDPDGSAEDDS |
| | | | LEQTSLMESSGKSPLSPDTPSSEEISY |
| | | | EVTPKTTDAGTPKPAVIPECAEEDDL |
| | | | ENGEKKRFTPEEEMFKMVTKIKISKQ |
| | | | KRDYKKEPKQEDSSSSSDADVECSA |
| | | | DLDEPKCMESVEDKSNAPVVVTAES |
| | | | RKASSSSESEPELTQLKKGADSGLLP |
| | | | EPVIRVQPPSPLPSSIDSNSSPEEVQFQ |
| | | | PIVSKQYTFKMNEDTQEDSGKSEEEE |
| | | | GCESHLPEDSHTVSTSGPEMSYDDV |
| | | | NRDADQPKICGSYGCEAESPSSSAIP |
| | | | VTLGLHSSTGEDVHEQLVIHKEPLAL |
| | | | QDTGEKDTEGEELDVSRVEAPQVGY |
| | | | PTESSSSSSSLPHCPASEGKELDEDVV |
| | | | STSSATKMEVTKADQAFESLPDDYS |
| | | | TQDLPNTTQTDSSSLDVPVSDPTETD |
| | | | DISDPQVTSPYENVPSQSFFSSEESKT |
| | | | QTDTRHTSFHSSEVCSVTTTSSVEEV |
| | | | VVTSSSGRTVSSQESNLEDQNLECKQ |
| | | | ESPLCEVQPDGAPSSLEPAAPTTSTV |
| | | | VGEQISKVIITKTDVDSDSWSEIREDD |
| | | | EAFEARVKEEEQKIFGLMVDRQSQG |
| | | | TTPDTTPARTPTEEGTPTSEQNPFLFQ |
| | | | EGKLFEMTRSGAIDMTKRSYGDESF |
| | | | HFFQIGQESREETLTEDMKEGGTGTE |
| | | | LPQLETSAESLAPLESKETVNDEADL |
| | | | VPDDLSEEVEEVPTSDGQLNSQMGIS |
| | | | ASTETSMKEAASAGAEDLPCIQMSD |
| | | | TPSLSLVKQAALQLDFSTVTRSVYSD |
| | | | RDDESPDSSPEEQKSVIEIPTAPMENV |
| | | | PSTESRSKIPVRTMPTSTPAFPSMECE |
| | | | SAPSEGFLPSLDEESQEDETKPKSKIP |
| | | | VKAPVPRVEQQLLHLDSSLQETVAP |
| | | | QGQDVTSRAPDSRSKSESDASPLDA |
| | | | KITCPEKTGSYTETDLESSEGTEELEL |
| | | | ESEDETTRPKIFASRLPVKSKSTTSSC |
| | | | RGATSPTKESKEHFFDLYRNSIEFFEE |
| | | | ISDEASKLVDRLTQSEREQELVSDDE |
| | | | SSSALEVSVIENLPPVETEQSIPEDIFD |
| | | | TRPIWDESIETLIERIPDENGHDHAED |
| | | | QQDEQERIEERLAYIADHLGFSWTEL |
| | | | ARELDFTEEQIHQIRIENPNSLQDQSH |
| | | | ALLKYWLERDGKHATDTNLIECLTK |
| | | | INRMDIVHLMETITEPLQERISHSYAE |
| | | | IEQTITLDHSEGFSVLQEELCTAQNK |
| | | | QKEEQAASKEGESYDHPPIVSEEDIS |
| | | | VGYSTFQDSIPKTEGDGSVTELLPKT |
| | | | HEEQVQQDFSGKMQDLPEESSLEQQ |
| | | | eyfvttpgteasetpkataapgspsk |
| | | | TPEEIITPPEEERPYLQTPTASEQGDSP |
| | | | IVQEPEEPPEHREASLPQKTSLVIVES |
| | | | ADDQPQTFERLDEDAAFQKGDDMP |
| | | | DIPPETVTEEEYVDEHGHTVVKKVT |
| | | | RKIIRRYVSSDGTEKEEMTMQGAPQ |
| | | | DPISIEEGDGYSKVIKRVVLKSDTERS |
| | | | EVRADFVERCK |
| SEQ ID | P49024 | Paxillin/Gallus | MDDLDALLADLESTTSHISKRPVFLT |
| NO: 190 | (UniProtKB) | gallus | EETPYSYPTGNHTYQEIAVPPPVPPPP |
| | | | SSEALNGTVIDPLDQWQPSVSRYGH |
| | | | QQPQSQSPIYSSSAKSSSASVPRDGLS |
| | | | SPSPRASEEEHVYSFPNKQKSAEPSPT |
| | | | MTSTSLGSNLSELDRLLLELNAVQH |
| | | | NPPSGFSADEVSRSPSLPNVTGPHYVI |
| | | | PESSSSAGGKAAPPTKEKPKRNGGR |
| | | | GIEDVRPSVESLLDELESSVPSPVPAI |
| | | | TVSQGEVSSPQRVNASQQQTRISASS |
| | | | ATRELDELMASLSDFKFMAQGKAG |
| | | | GSSSPPSTTPKPGSQLDTMLGSLQSD |
| | | | LNKLGVATVAKGVCGACKKPIAGQ |
| | | | VVTAMGKTWHPEHFVCTHCQEEIGS |
| | | | RNFFERDGQPYCEKDYHNLFSPRCY |
| | | | YCNGPILDKVVTALDRTWHPEHFFC |
| | | | AQCGVFFGPEGFHEKDGKAYCRKD |
| | | | YFDMFAPKCGGCARAILENYISALNT |
| | | | LWHPECFVCRECFTPFINGSFFEHDG |
| | | | QPYCEVHYHERRGSLCSGCQKPITGR |
| | | | CITAMGKKFHPEHFVCAFCLKQLNK |
| | | | GTFKEQNDKPYCQNCFLKLFC |
| SEQ ID | F1MFD1 | Paxillin OS = Bos | ALLADLESTTSHISKRPVFLSEETPYS |
| NO: 191 | (UniProtKB) | taurus | YPTGNHTYQEIAVPPVPPPPSSEALN |
| | | | GSVLDPLDPWPPSTSRFTHQQPQSSS |
| | | | PVYGSSAKTSSASNPQDGGGPPCPRA |
| | | | GEEDHVYSFPNKQKSAEPSPTVMSSS |
| | | | LGSNLSELDRLLLELNAVQHNPPGFP |
| | | | ADEANSSPPLPGPLSTHYGVPENNSL |
| | | | LGGKAGALTKEKPKRNGGRGLEDLR |
| | | | PSVENLLDELESSVPSPVPTITVNQGE |
| | | | MSSPQRVTSSQQQTRISASSATRELD |
| | | | ELMASLSDLSKIQDLEQRADGELCW |
| | | | AAGWPLNGRQSGPEGQDMGGFMAQ |
| | | | GKTGSSSPPGGPPKPGSQLDSMLGSL |
| | | | QSDLNKLGVATVAKGVCGACKKPIA |
| | | | GQVVTAMGKTWHPEHFVCTHCQEEI |
| | | | GSRNFFERDGQPYCEKDYHNLFSPR |
| | | | CYYCNGPILDKVVTALDRTWHPEHF |
| | | | FCAQCGAFFGPEGFHEKDGKAYCRK |
| | | | DYFDMFAPKCGGCARAILENYISAL |
| | | | NTLWHPECFVCRECFTPFVHGSFFEH |
| | | | EGQPYCEAHYHERRGSLCSGCQKPIT |
| | | | GRCITAMAKKFHPEHFVCAFCLKQL |
| | | | NKGTFKEQNDKPYCQNCFLKLFC |
| SEQ ID | A0A287BTJ4 | Paxillin/Sus | DALLADLESTTSHISKRPVFLSEETPY |
| NO: 192 | (UniProtKB) | scrofa | SYPTGNHTYQEIAVPPPVPPPPSSEAL |
| | | | NGSVLDPIDQWQPSTSRFIHQQPQAP |
| | | | SPVYGSSAKTSSSSNPQDGIGLPCPRA |
| | | | SEEEHVYSFPNKQKSAEPSPTVMSSS |
| | | | LGSNLSELDRLLLELNAVQHNAPGFP |
| | | | TDEANSSPPLPGALSPHYGVLEHNSS |
| | | | LGGKAGPVTKEKPKRNGGRGLEDV |
| | | | RPSVESLLDELESSVPSPVPAITLNQG |
| | | | EMNSPQRVTSSQQQTRISASSATREL |
| | | | DELMASLSDFKFMAQGKTGSSSPPG |
| | | | GPPKPGSQLDSMLGSLQSDLNKLGV |
| | | | ATVAKGVCGACKKPIAGQVVTAMG |
| | | | KTWHPEHFVCTHCQEEIGSRNFFERD |
| | | | GQPYCEKDYHNLFSPRCYYCNGPIL |
| | | | DKVVTALDRTWHPEHFFCAQCGAFF |
| | | | GPEGFHEKDGKAYCRKDYFDMFAP |
| | | | KCGGCARAILENYISALNTLWHPECF |
| | | | VCRECFTPFVNGSFFEHDGQPYCEVH |
| | | | YHERRGSLCSGCQKPITGRCITAMAK |
| | | | KFHPEHFVCAFCLKQLNKGTFKEQN |
| | | | DKPYCQNCFLKLFC |
| SEQ ID | L8IF19 | Telethonin/Bos | MATSELSCLVSEENCERREAFWAEW |
| NO: 193 | (UniProtKB) | mutus | KDLTLSTRPEEGCSLHEEDTQRHETY |
| | | | HRQGQCQAL |
| | | | VQRSPWLVMRMGILGRGLQEYQLP |
| | | | YQRVLPLPIFTPAKVGTKEEREETPIQ |
| | | | LQELLALET |
| | | | ALGGQCVDRQDVAEITKQLPPVVPV |
| | | | SKPGTLRRSLSRSMSQEAQRG |
| SEQ ID | P81947 | Tubulin alpha- | MRECISIHVGQAGVQIGNACWELYC |
| NO: 194 | (UniProtKB) | 1B chain/Bos | LEHGIQPDGQMPSDKTIGGGDDSFNT |
| | | taurus | FFSETGAGKHVPRAVFVDLEPTVIDE |
| | | | VRTGTYRQLFHPEQLITGKEDAANN |
| | | | YARGHYTIGKEIIDLVLDRIRKLADQ |
| | | | CTGLQGFLVFHSFGGGTGSGFTSLLM |
| | | | ERLSVDYGKKSKLEFSIYPAPQVSTA |
| | | | VVEPYNSILTTHTTLEHSDCAFMVDN |
| | | | EAIYDICRRNLDIERPTYTNLNRLISQI |
| | | | VSSITASLRFDGALNVDLTEFQTNLV |
| | | | PYPRIHFPLATYAPVISAEKAYHEQLS |
| | | | VAEITNACFEPANQMVKCDPRHGKY |
| | | | MACCLLYRGDVVPKDVNAAIATIKT |
| | | | KRSIQFVDWCPTGFKVGINYQPPTVV |
| | | | PGGDLAKVQRAVCMLSNTTAIAEA |
| | | | WARLDHKFDLMYAKRAFVHWYVG |
| | | | EGMEEGEFSE |
| | | | AREDMAALEKDYEEVGVDSVEGEG |
| | | | EEEGEEY |
| SEQ ID | O57613 | Paranemin/ | MLSMEGFVGARALGEESLQMWDLN |
| NO: 195 | (UniProtKB) | Gallus gallus | KRLEAYLARVKFLEEENEGLRAEIQS |
| | | | TKENPAGDPRRARYEEELRSLRDAL |
| | | | HRAFTEKCAAELARDNLYEEVQHVR |
| | | | SRCQKEQAAREEAKRQLSSSKKELE |
| | | | EERRAQIWLKERAVQLEKEVEALLE |
| | | | VHEEEKAGLDQELASFSQSLEGFRCA |
| | | | PVAFQPVEVEDYSKRLSEIWRGAVE |
| | | | TYKAEVSQLERALGQAKENLWQVA |
| | | | EDNQQSQLQLRHLEKELVGLKVRKE |
| | | | MLEESLGQQWQEQHGEAEKFQLAIE |
| | | | ALEQEKQSLQVQIAQVLEDRQQLMH |
| | | | LKMSLSLEVATYRTLLEAESTRLQM |
| | | | PPGEFKLANSLRDVKLEASSSKHRAS |
| | | | LAAFPRPEGVAQLCRTPGDALKVLT |
| | | | PKSKSSSALEFQKISSVLQAPRSWEP |
| | | | AAPSPTVPVVSPEPGSGGAESPVHEC |
| | | | GAGKESPMLSPLSPEQLVNHALQDA |
| | | | LKEMQDDAEAKEVPTLSATQSTRDG |
| | | | DLEATMEEEEAAGTQGVGAEGETVS |
| | | | PPGLCFCSNEPTLLSATQSDVESQEE |
| | | | MWEEERSKEEMLNPLSSMESQEPGG |
| | | | EPWGGVTRRSRLQVGKEDMEATSTE |
| | | | ALHISEKKEQREIWSPSREDEECEFPD |
| | | | EEREMQEEGSLQMEIEAACAVPVGS |
| | | | HPVLPTGIHLQEDFLEREQESEHQET |
| | | | SLGELGAAAGEEREQEVCQELKASSI |
| | | | EEAMPAAEGSSGSGEGTTGRESTGR |
| | | | ARDDEGEEEDKGREALGEDDLQAGE |
| | | | ALGAKELGKESMGLEEAEGMWEES |
| | | | VDLQEEHRDLQEGHGDLQVEHEDL |
| | | | WEEHGHIQEEHGDTQEEYGDTQEEH |
| | | | GDLQVEGGDLQEEHGDTQEEHGDL |
| | | | QEEHGDTQEEHGDLQVEHEDLQVEH |
| | | | GDLWEEHRDVQEEHGDTQEEYGDT |
| | | | QEEHGDLQVEGGDLQEEHGDTQEEH |
| | | | EDLQEEHGDTQEEHGDLQVEHGDLQ |
| | | | EEHRDLQEGHGDLKEEHGDLQVEHE |
| | | | DLQVEHGDLQEEHGDTQEEHGDLQE |
| | | | EHGDLQVEHEDLQVEHGDLQVEHG |
| | | | DLQEEHGDTQEEHRDLQEVHGDQQ |
| | | | EEHRDLQEGHGDLQEEHGDLQVEH |
| | | | GDLQEEYGDTQEEHRDLQEVHGDQ |
| | | | QEEHRNLQEGHGDLQEGHGDLQEE |
| | | | HGDLWKEHGVLKEEHGDLQEGHGD |
| | | | LQEESGDPQEEPGEPWVQHGEQGSA |
| | | | GDGLEQDMVLQPGEGAWGREDNDI |
| | | | SQKQQAQDWEGTAEDEEETGVNTIT |
| | | | SQEPTQVDDNPHAEAAENEERDVTS |
| | | | PTAMEETQEGEDEGDAGSEVQSQQQ |
| | | | PQDTPGQEAEPAPGQKEVRYGDTGE |
| | | | APGDPQEPAEALEVEDEELSSEPIELE |
| | | | RGSPDTAVMQQDLGNGAESDEPME |
| | | | EDFQSEDAQLEEPKACRMELEDTLL |
| | | | NSTPLCAYSGEMLESDPNPPSSGGDG |
| | | | EAAPEMAQEEEGDLRGSDEAAVHAE |
| | | | PESCEELSPAPECTEEEEGYFIVSAPS |
| | | | QEGSSMEEAENSEEFEEIKVEAAEDR |
| | | | KDELTAPGVASLVPEDEGHSEPFVGE |
| | | | AEDVKMPLGEFEMPKEEDEEDAGGF |
| | | | AAELEEGLTVPVAEGLSEGHTDKTT |
| | | | LGDEGLGEEDVQDGDNPPATETSDT |
| | | | DPSNTDPPPGTMLEHGAGMEAAEYL |
| | | | PDVPTQLPVDIMKDSDILEIVEQALEF |
| | | | NQELVLGAKLAKDGQEEDGDAQPP |
| | | | QEEEGGSSPTSSCDEQPTVQEAVAEP |
| | | | ERTKNGEQNGLHRQASLEDLAEFTE |
| | | | EGLNGITHPGEAPAAHTLPLPSKHSG |
| | | | AEPVPELSPLQTTSCARSRSPGPLGRS |
| | | | DAVGPHSPATIGRLP |
| SEQ ID | E7EYD0 | Myomesin 1a | MSESLKLQKEQEERDLETRYESSYH |
| NO: 196 | (UniProtKB) | (skelemin)/ | QSSLSSVSRQSYTAYVSSHGHKISGK |
| | | Danio rerio | KKEKKLTPLSKKEKRSYLAVDKEDE |
| | | | VIGYVVPVFRSSHLATQDLMETQEE |
| | | | VKEEGVGYVVMRNLFARESGFKMR |
| | | | TVKKTRETSMRESAERMALSQKLHE |
| | | | KEQFQKKMNPDSLTHPPEFIVKPRGQ |
| | | | TVWEGKSVTLHCTVAGWPKPRVAW |
| | | | YKNNVLIDAKARPEKYFTESQYNMH |
| | | | SLEIKNCTFSDTAEYRISALNVKGESS |
| | | | AFAPVIIKRFKEEEELVERPHGYSPEY |
| | | | GVTFNTTIIDKFDVSFGREGETMSLG |
| | | | CTVIVYPTVKRYQPEIVWYRNGVAL |
| | | | SSSKWVHMHWSGEKATLTLVHLNK |
| | | | EDEGLYTLRVNTKSGFDTHSAYVFV |
| | | | RDADVEEEGVPVAPLDVRCHDANK |
| | | | DYVVVTWKQPAVEGSSAITGYFIDR |
| | | | LEVGNHHWTQCNDTPVKYARFPVT |
| | | | GLIEGRSYMFRVRALNNAGVSRPSR |
| | | | VSDPVVAMDPSDRARLRAGPSAPWT |
| | | | GVIKFTEEDPTVGVIPGPPTDLAVTE |
| | | | ATKSYVVLSWKPPVQRGHEGVMYY |
| | | | VEKCLVGTDAWQRVNTGIPVKSPRF |
| | | | ALFDLAEDKSYTFRVRSCNSAGVGE |
| | | | PSEETGATTVGDRLDLPSAPGPVIPIR |
| | | | NTDSSVVVCWGASKEVKDLVGYYIE |
| | | | VTVDGSGVWAPCNNKPVKGTRFVC |
| | | | HGLNATDKCTFRVKAVNAAGYSGSS |
| | | | AESEACLVKASIAVPSPPTGVTTLER |
| | | | LRDYMVIGWQAPAKTGGADIRGYY |
| | | | LDYRTVKDGVTSKWHELNLKAVTSs |
| | | | PYKVTDLKENEFYQFQVRAFNQAGI |
| | | | SEASIPTAPLECKEWTVAVPGPPHGL |
| | | | RVQEVRKDSMVVLWEPPTFNGRSPV |
| | | | TGYYVDFKEENGRWRCVQERSTKH |
| | | | TYMKVSGLQEGISYRLRIHAKNLAG |
| | | | VGVPSKATDAILAETRPGTNEIVVDV |
| | | | DDNGVISLIFECSDLKEDSQFVWSKN |
| | | | YEAFTDSSRLTIQTTGGKSRAIFNDPS |
| | | | LDDLGIYSCVVTNTDGVSASYTLTEE |
| | | | GLKRLLDISHDHQFPIIPFKSEMAIEL |
| | | | QEKGRVRFWAEVGKFTSNLQVEYVF |
| | | | NDNVIHEGKKYTMNFNKSTGIIEMF |
| | | | MDLLEVTDEGTFTFNLVDGKATGRT |
| | | | SLVLIGEEFAELQKKSEFERAEWVRR |
| | | | QGPHFVEYLSFEVTPECDVHLKCKV |
| | | | GNIKPATEIAWFKDGIEIEEDDEDAK |
| | | | KIGKSDEVLTFDIGKLVIKSEKAERK |
| | | | KKPATEESPSKPKISKKDAGVYEVKL |
| | | | KDERGKDKTLLNLTDAGYQAVLNE |
| | | | VFRVIANSSTELKVMSTEHGIILYSFV |
| | | | VHYLEDLRVGWLHKESKISHSDRVQ |
| | | | CGVTGEQLWLKINEPTEKDKGKYAI |
| | | | DIFDGKGSVKRVLDLSGQVWEEAFE |
| | | | EFKRLKAAAIAERNRARVVGGLPDV |
| | | | VTIQEGKSLNLTGNVWGDPAPEVSW |
| | | | IKNEKPLVCDEHHTLKYEHSKFASITI |
| | | | AAVTTTDSGKYALLVKNKYGTEAA |
| | | | EFTVSVYIPEDEAEKKE |

### 7.1. Table 8

TABLE 8
Sequences of codon-optimized genes

| SEQ ID | Protein | Donor | | |
|---|---|---|---|---|
| NO | name | animal | Host | DNA sequence |
| SEQ ID | Cofilin 2 | Chicken | S. cerevisiae | ATGGCATCAGGCGTCACAGTGAACGATG |
| NO: 197 | | | | AAGTTATCAAGGTTTTCAACGATATGAA |
| | | | | AGTTCGTAAGTCTAGCACCCCAGAGGAA |
| | | | | ATCAAAAAGAGAAAAAAAGCTGTCTTGT |
| | | | | TTTGTTTATCCGATGACAAAAAGCAGAT |
| | | | | TATTGTAGAGGAAGCTACTAGAATCCTT |
| | | | | GTGGGTGATATAGGTGACACTGTAGAGG |
| | | | | ATCCTTACACTGCCTTCGTCAAGTTGTTA |
| | | | | CCATTAAATGATTGCAGATATGCTCTCTA |
| | | | | CGACGCTACATACGAAACCAAGGAATCT |
| | | | | AAAAAAGAGGACTTGGTTTTCATCTTTT |
| | | | | GGGCCCCTGAATCCGCGCCACTGAAGAG |
| | | | | TAAGATGATATACGCATCTTCAAAGGAT |
| | | | | GCAATTAAAAAAAAGTTCACAGGTATTA |
| | | | | AGCATGAATGGCAAGTTAACGGGCTTGA |
| | | | | TGATATTAAAGATAGATCTACATTGGGT |
| | | | | GAAAAGCTAGGCGGAAATGTTGTGGTTT |
| | | | | CATTGGAAGGAAAGCCACTATAA |
| SEQ ID | Profilin | Chicken | S. cerevisiae | ATGGCTGGCTGGCAATCTTATGTGGATA |
| NO: 198 | | | | ACTTAATGTGTGATGGATGTTGTCAAGA |
| | | | | GGCTGCAATCGTGGGTTACTGCGACGCA |
| | | | | AAATACGTTTGGGCAGCAACAGCTGGGG |
| | | | | GCATATTCCAATCAATTACACCAGTTGA |
| | | | | AATTGATATGATCGTTGGTAAAGATAGA |
| | | | | GAGGGATTTTTCACTAATGGTCTAACTTT |
| | | | | AGGTGCCAAAAAGTGCAGTGTTATCAGA |
| | | | | GACTCACTGTACGTAGACGGGGATTGCA |
| | | | | CCATGGATATTCGTACAAAGTCTCAGGG |
| | | | | TGGAGAACCTACATACAACGTCGCGGTC |
| | | | | GGCAGAGCCGGGAGAGTTTTGGTTTTCG |
| | | | | TAATGGGCAAGGAAGGTGTCCATGGTGG |
| | | | | TGGACTTAACAAAAAGGCCTACTCTATG |
| | | | | GCTAAGTACTTGAGAGATTCCGGTTTTTA |
| | | | | A |
| SEQ ID | Coronin | Chicken | S. cerevisiae | ATGTCTCGTAGAGTTGTTAGACAATCCA |
| NO: 199 | | | | AGTTCCGTCACGTGTTCGGCCAACCAGT |
| | | | | TAAGGCAGATCAGATGTACGAAGATATC |
| | | | | AGAGTTTCAAAGGTTACCTGGGACTCAT |
| | | | | CTTTTTGCGCTGTTAACCCAAAGTTCGTA |
| | | | | GCAATAATTGTGGAAGCTGGCGGTGGGG |
| | | | | GAGCATTTATGGTTTTACCACTAGCCAA |
| | | | | GACTGGTAGAGTCGACAAAAATCACCCT |
| | | | | TTAGTCACTGGACATACAGCACCTGTAT |
| | | | | TAGATATTGACTGGTGTCCACATAACGA |
| | | | | CAATGTTATTGCAAGTGCATCTGAGGAT |
| | | | | ACAACTGTCATGGTATGGCAAATCCCAG |
| | | | | ACTACGTTCCAGTAAGATCAATCACAGA |
| | | | | ACCAGTTGTCACGCTCGAGGGTCACTCT |
| | | | | AAGAGAGTTGGCATTATCTGTTGGCATC |
| | | | | CTACAGCCAGAAATGTGTTGTTGTCTGC |
| | | | | CGGTTGCGATAACTTGGTAATTCTTTGGA |
| | | | | ACGTCGGTACAGGCGAAATGTTGCTGGC |
| | | | | GCTTGAAGATATGCACACTGACCTCATT |
| | | | | TACAACGTCGGATGGAACAGAAACGGGT |
| | | | | CGTTATTAGTCACCACATGTAAAGATAA |
| | | | | AAAGGTAAGGGTTATCGACCCTAGAAAG |
| | | | | CAAACAGTTGTTGCGGAAATCACAAAGC |
| | | | | CACATGATGGTGCTAGACCAATTAGAGC |
| | | | | TATATTCATGGCCGATGGTAAGATTTTCA |
| | | | | CAACCGGATTCTCAAAAATGTCCGAGAG |
| | | | | ACAACTTGGGTTGTGGGATCTTAAAAAC |
| | | | | TTCGAGGAACCAATTGCTCTGCAGGAAA |
| | | | | TGGATACTAGTAATGGTGTTTTGTTACCA |
| | | | | TTTTACGACCCAGACACAAACATCGTTT |
| | | | | ACCTCTGCGGCAAGGGTGATAGTAGCAT |
| | | | | CAGATATTTTGAGATAACAGATGAAGCT |
| | | | | CCTTACGTCCATTACTTGAATACTTACTC |
| | | | | CTCAAAGGAACCACAGAGAGGTATGGG |
| | | | | ATTCATGCCAAAGCGAGGACTAGATGTT |
| | | | | TCTAAGTGTGAAATCGCTAGATTTTTCAA |
| | | | | GTTACATGAGAGAAAATGCGAACCTATT |
| | | | | GTGATGACAGTGCCTAGAAAATCTGATT |
| | | | | TGTTCCAAGATGATCTATATCCAGATACT |
| | | | | CCTGGCCCAGAACCAGCCCTTGAAGCTG |
| | | | | ATGAATGGTTATCTGGTAAAGATGCAGA |
| | | | | GCCAATACTAATTTCTCTTAGAGATGGG |
| | | | | TACGTCCCAGTGAAAAACAGAGAGTTGA |
| | | | | AAGTTGTTAAAAAAAATATTTTGGATAG |
| | | | | CAAGCCTCCTCCAGGTCCTCGTAGATCTC |
| | | | | ACTCCACATCAAACACCGATATATCAAC |
| | | | | ACCAGCTTTGGATGAAGTTTTAGAGGAA |
| | | | | ATCCGGGTGTTGAAGGAAACTGTACAAG |
| | | | | CACAAGAGAAGAGAATCTCAGCACTGG |
| | | | | AACATAAGCTATGTCAATTTACTAATGG |
| | | | | TACCGACTAA |
| SEQ SEQ | Myozenin | Turkey | S. cerevisiae | ATGCCTTTAGCCGGAACCCCAGCACCAT |
| ID NO: | 1 | | | TGAAGAGAAAAAAGCCAACAAAACTTA |
| 200 | | | | TTGGTAAGCTGACACACGAAGTTAT |
| | | | | GCCACAGGAAGTTACCAAGTTGAATCTA |
| | | | | GGTAAAAAGATTTCTATCCCTAGAGATG |
| | | | | TCATGTTGGAAGAGTTATCGTTAT |
| | | | | TGACGAACAAAGGTTCCAAAATGTTCAA |
| | | | | GTTGAGACAATTAAGAGTCGAGAAATTC |
| | | | | ATTTACGAAAACAATCCAGACGCA |
| | | | | TTCTCCGATAACAGTGTTGATCATTTTCA |
| | | | | ACGTTTTATCCCATCTGGTGGACATTATG |
| | | | | GTGAAGATGCCCATGGGTACGG |
| | | | | TCATGGTCGTATGGTTGGGGGCGTTACA |
| | | | | GCCGGGCAACATGGTTCATCAAAGCAAC |
| | | | | ATTACAGTACCGTGCCTCCTCGAC |
| | | | | CTGGTTCTAAGGGTGGTCCAGGTAACTC |
| | | | | TGAGGGTGAACATGCTGAAAAGTCAGCT |
| | | | | GGGTCTGCTGGAGAGGGCGGCCAC |
| | | | | GGTACAGAAAAGGATGGTAAGAGTGGT |
| | | | | GGCAAAAAGCCTCTACTTAAGACTTACA |
| | | | | TCAGCCCATGGGAGAGAGCGATGGG |
| | | | | AATCTCACCAGAGGATAAGAGCCAGTTA |
| | | | | ACTATTGATCTTCTATCATATTCACCAAA |
| | | | | GGCAGACTTCCCACACTACAAAT |
| | | | | CTTTTAACAGAACAGCAATGCCATACGG |
| | | | | CGGATACGAAAAAGCTGCTAAGAGAAT |
| | | | | GACATTTAAGGTACCTCAATTCGAT |
| | | | | ATCTGTCCACTGTTGCCAGAATCCATAGT |
| | | | | ACTCTACAACCAAAATTTCAGAAACAGA |
| | | | | CCATCATTCAATAGAACTCCTAT |
| | | | | ACCTTGGATGCCATCTGGCGAATCTTCC |
| | | | | GAATACCACACTGACATTAACGTGCCAA |
| | | | | GATCTGGAGAAACAGAGGAATTGT |
| | | | | AA |
| SEQ ID | Troponin | Pig | S. cerevisiae | ATGACTGATCAACAAGCTGAAGCAAGAT |
| NO: 201 | C, | | | CTTACCTTAGTGAAGAGATGATAGCAGA |
| | skeletal | | | GTTTAAGGCAGCGTTCGATATGTTCGAT |
| | muscle | | | GCCGACGGTGGTGGCGATATCTCTGTGA |
| | | | | AGGAACTCGGTACAGTTATGAGAATGCT |
| | | | | GGGGCAAACACCAACCAAGGAAGAGTT |
| | | | | GGATGCAATCATCGAAGAGGTCGACGAA |
| | | | | GATGGGTCAGGTACAATTGATTTTGAAG |
| | | | | AGTTTTTGGTTATGATGGTAAGACAGAT |
| | | | | GAAAGAGGATGCTAAGGGTAAGTCAGA |
| | | | | AGAGGAATTAGCTGAATGTTTTAGAATT |
| | | | | TTCGATAGAAATGCTGATGGATACATTG |
| | | | | ACGCTGAGGAACTAGCCGAAATTTTCCG |
| | | | | TGCCTCTGGAGAACATGTCACTGATGAG |
| | | | | GAATTGGAATCCTTAATGAAAGATGGCG |
| | | | | ACAAAAACAACGAGGGTAGAATCGACTT |
| | | | | CGACGAATTCCTTAAGATGATGGAAGGC |
| | | | | GTTCAATAA |
| SEQ ID | Cofilin 2 | Chicken | K. phaffii | ATGGCTTCTGGTGTGACTGTTAACGACG |
| NO: 202 | | | | AAGTCATCAAGGTATTCAATGATATGAA |
| | | | | AGTTAGAAAATCATCCACTCCAGAGGAA |
| | | | | ATCAAAAAGAGAAAAAAAGCCGTTCTAT |
| | | | | TTTGCCTGTCGGACGACAAAAAGCAGAT |
| | | | | CATCGTTGAGGAAGCCACACGTATTTTG |
| | | | | GTCGGTGACATTGGTGACACAGTCGAAG |
| | | | | ATCCTTATACTGCTTTTGTTAAGCTGTTG |
| | | | | CCCTTAAATGATTGTAGGTACGCTCTGTA |
| | | | | CGACGCAACTTACGAAACCAAAGAGTCC |
| | | | | AAAAAAGAGGATTTGGTGTTCATCTTCT |
| | | | | GGGCACCTGAAAGTGCTCCACTTAAGAG |
| | | | | CAAGATGATTTATGCATCCTCTAAAGAT |
| | | | | GCTATTAAAAAAAAGTTTACAGGTATAA |
| | | | | AGCATGAGTGGCAAGTGAACGGATTGGA |
| | | | | TGACATTAAAGATAGATCTACGTTGGGC |
| | | | | GAAAAGCTTGGTGGAAATGTTGTAGTGT |
| | | | | CATTAGAGGGAAAGCCACTCTAA |

### 8. EQUIVALENTS

[0461] While various specific embodiments have been illustrated and described, the above specification is not restrictive. It will be appreciated that various changes can be made without departing from the spirit and scope of the invention(s). Many variations will become apparent to those skilled in the art upon review of this specification.

### 9. REFERENCES CITED

[0462] [1] H. F. Gemede and N. Ratta, “Antinutritional factors in plant foods: Potential health benefits and adverse effects,” International Journal of Nutrition and Food Sciences, vol. 3, no. 4, pp. 284-289, 2014.
[0463] [2] G. Rimbach, J. Pallauf, J. Moehring, K. Kraemer and A. M. Minihane, “Effect of dietary phytate and microbial phyatse on mineral and traceelement bioavailability—a literature review,” Current Topics in Nutraceutical Research, vol. 6, no. 3, pp. 131-144, 2008.
[0464] [3] R. M. Yamka, U. Jamikorn, A. D. True and D. L. Harmon, “Evaluation of soyabean meal as a protein source in canine foods,” Animal Feed Science and Technology, vol. 109, pp. 121-132, 2003.
[0465] [4] K. E. Michel, “Unconventional Diets for Dogs and Cats,” Veterinary Clinics: Small Animal Practice, vol. 36, no. 6, p. 1269-1281, 2006.
[0466] [5] K. Kanakubo, A. J. Fascetti and J. A. Larsen, “Assessment of protein and amino acid concentrations and labeling adequacy of commercial vegetarian diets formulated for dogs and cats,” Journal of the American Veterinary Medical Association, vol. 247, no. 4, pp. 385-392, 2015.
[0467] [6] M. Friedman, “Nutritional Value of Proteins from Different Food Sources. A Review,” Journal of Agricultural and Food Chemistry, vol. 44, pp. 6-29, 1996.
[0468] [7] C. M. Gray, R. K. Sellon and L. M. Freeman, “Nutritional adequacy of two vegan diets for cats,” Timely Topics in Nutrition, vol. 225, no. 11, pp. 1670-1675, 2004.
[0469] [8] A. Knight and M. Leitsberger, “Vegetarian versus Meat-Based Diets for Companion Animals,” Animals, vol. 6, no. 57, pp. 1-20, 2016.
[0470] [9] J. L. Kaplan, J. A. Stern, A. J. Fascetti, J. A. Larsen, H. Skolnik, G. D. Peddle, R. D. Kienle, A. C. M. Waxman, C. T. Gunther-Harrington, T. Klose, K. LaFauci and B. Lefbom, “Taurine deficiency and dilated cardiomyopathy in golden retrievers fed commercial diets,” PLOS ONE, 13 Dec. 2018.
[0471] [10] M. M. Rojas-Downing, A. P. Nejadhashemi, T. Harrigan and S. A. Woznicki, “Climate change and livestock: Impacts, adaptation, and mitigation,” Climate Risk Management, vol. 16, pp. 145-163, 2017.
[0472] [11] Y. M. Bar-On, R. Phillips and R. Milo, “The biomass distribution on Earth,” PNAS, vol. 115, no. 25, pp. 6506-6511, 2018.
[0473] [12] “Living Planet Report 2016,” World Wide Fund For Nature, Gland, Switzerland, 2016.
[0474] [13] F. P. J. van Bree, G. C. A. M. Bokken, R. Mineur, F. Franssen, M. Opsteegh, J. W. B. van der Giessen, L. J. A. Lipman and P. A. M. Overgaauw, “Zoonotic bacteria and parasites found in raw meat-based diets for cats and dogs,” Veterinary Record, p. 10.1136/vr.104535, 2018.
[0475] [14] A. G. Mathew, R. Cissell and S. Liamthong, “Antibiotic Resistance in Bacteria Associated with Food Animals: A United States Perspective of Livestock Production,” FOODBORNE PATHOGENS AND DISEASE, vol. 4, no. 2, pp. 115-133, 2007.
[0476] [15] S. A. McEwen and P. J. Fedorka-Cray, “Antimicrobial Use and Resistance in Animals,” Clinical Infectious Diseases, vol. 34, no. Suppl 3, pp. S93-S106, 2002.
[0477] [16] W. Witte, “Selective pressure by antibiotic use in livestock,” International Journal of Antimicrobial Agents, vol. 16, pp. S19-S24, 2000.
[0478] [17] “Summary Report On Antimicrobials Sold or Distributed for Use in Food-Producing Animals,” Food and Drug Administration, 2014.
[0479] [18] J. E. Markovich, C. R. Heinze and L. M. Freeman, “Thiamine deficiency in dogs and cats,” Journal of the American Veterinary Medical Association, vol. 243, no. 5, pp. 649-656, 2013.
[0480] [19] M. Steer, “A COMPARISON OF LAND, WATER AND ENERGY USE BETWEEN CONVENTIONAL AND YEAST-DERIVED DAIRY PRODUCTS: AN INITIAL ANALYSIS,” University of the West of England, 2015.
[0481] [20] X. Zheng, K. Diraviyam and D. Sept, “Nucleotide Effects on the Structure and Dynamics of Actin,” Biophysical Journal, vol. 93, no. 4, p. 1277-1283, 2007.
[0482] [21] R. Dominguez, “A Common Binding Site for Actin-Binding Proteins on the Actin Surface,” in Actin-Monomer-Binding Proteins, New York, N.Y.: Springer, 2007.
[0483] [22] T. D. Pollard and G. G. Borisy, “Cellular Motility Driven by Assembly and Disassembly of Actin Filaments,” Cell, vol. 112, no. 4, pp. 453-465, 2003.

### 10. INCORPORATION BY REFERENCE

[0484] All publications, patents, patent applications and other documents cited in this application are hereby incorporated by reference in their entireties for all purposes to the same extent as if each individual publication, patent, patent application or other document were individually indicated to be incorporated by reference for all purposes.

The application's sequence listing, which the Patent Office published only in electronic form, follows.

SEQUENCE LISTING (204 sequences)

SEQ ID NO: 1 - protein, 166 aa, Gallus gallus
MASGVTVNDEVIKVFNDMKVRKSSTPEEIKKRKKAVLFCLSDDKKQIIVEEATRILVGDIGDTVEDPYTAFVKLLPLNDCRYALYDATYETKESKKEDLVFIFWAPESAPLKSKMIYASSKDAIKKKFTGIKHEWQVNGLDDIKDRSTLGEKLGGNVVVSLEGKPL

SEQ ID NO: 2 - DNA, 501 bp, Artificial Sequence
  Description of Artificial Sequence: Synthetic polynucleotide
atggcatcaggcgtcacagtgaacgatgaagttatcaaggttttcaacgatatgaaagttcgtaagtctagcaccccagaggaaatcaaaaagagaaaaaaagctgtcttgttttgtttatccgatgacaaaaagcagattattgtagaggaagctactagaatccttgtgggtgatataggtgacactgtagaggatccttacactgccttcgtcaagttgttaccattaaatgattgcagatatgctctctacgacgctacatacgaaaccaaggaatctaaaaaagaggacttggttttcatcttttgggcccctgaatccgcgccactgaagagtaagatgatatacgcatcttcaaaggatgcaattaaaaaaaagttcacaggtattaagcatgaatggcaagttaacgggcttgatgatattaaagatagatctacattgggtgaaaagctaggcggaaatgttgtggtttcattggaaggaaagccactataa

SEQ ID NO: 3 - protein, 140 aa, Gallus gallus
MAGWQSYVDNLMCDGCCQEAAIVGYCDAKYVWAATAGGIFQSITPVEIDMIVGKDREGFFTNGLTLGAKKCSVIRDSLYVDGDCTMDIRTKSQGGEPTYNVAVGRAGRVLVFVMGKEGVHGGGLNKKAYSMAKYLRDSGF

SEQ ID NO: 4 - DNA, 423 bp, Artificial Sequence
  Description of Artificial Sequence: Synthetic polynucleotide
atggctggctggcaatcttatgtggataacttaatgtgtgatggatgttgtcaagaggctgcaatcgtgggttactgcgacgcaaaatacgtttgggcagcaacagctgggggcatattccaatcaattacaccagttgaaattgatatgatcgttggtaaagatagagagggatttttcactaatggtctaactttaggtgccaaaaagtgcagtgttatcagagactcactgtacgtagacggggattgcaccatggatattcgtacaaagtctcagggtggagaacctacatacaacgtcgcggtcggcagagccgggagagttttggttttcgtaatgggcaaggaaggtgtccatggtggtggacttaacaaaaaggcctactctatggctaagtacttgagagattccggtttttaa

SEQ ID NO: 5 - protein, 471 aa, Gallus gallus
MSRRVVRQSKFRHVFGQPVKADQMYEDIRVSKVTWDSSFCAVNPKFVAIIVEAGGGGAFMVLPLAKTGRVDKNHPLVTGHTAPVLDIDWCPHNDNVIASASEDTTVMVWQIPDYVPVRSITEPVVTLEGHSKRVGIICWHPTARNVLLSAGCDNLVILWNVGTGEMLLALEDMHTDLIYNVGWNRNGSLLVTTCKDKKVRVIDPRKQTVVAEITKPHDGARPIRAIFMADGKIFTTGFSKMSERQLGLWDLKNFEEPIALQEMDTSNGVLLPFYDPDTNIVYLCGKGDSSIRYFEITDEAPYVHYLNTYSSKEPQRGMGFMPKRGLDVSKCEIARFFKLHERKCEPIVMTVPRKSDLFQDDLYPDTPGPEPALEADEWLSGKDAEPILISLRDGYVPVKNRELKVVKKNILDSKPPPGPRRSHSTSNTDISTPALDEVLEEIRVLKETVQAQEKRISALEHKLCQFTNGTD

SEQ ID NO: 6 - DNA, 1416 bp, Artificial Sequence
  Description of Artificial Sequence: Synthetic polynucleotide
atgtctcgtagagttgttagacaatccaagttccgtcacgtgttcggccaaccagttaaggcagatcagatgtacgaagatatcagagtttcaaaggttacctgggactcatctttttgcgctgttaacccaaagttcgtagcaataattgtggaagctggcggtgggggagcatttatggttttaccactagccaagactggtagagtcgacaaaaatcaccctttagtcactggacatacagcacctgtattagatattgactggtgtccacataacgacaatgttattgcaagtgcatctgaggatacaactgtcatggtatggcaaatcccagactacgttccagtaagatcaatcacagaaccagttgtcacgctcgagggtcactctaagagagttggcattatctgttggcatcctacagccagaaatgtgttgttgtctgccggttgcgataacttggtaattctttggaacgtcggtacaggcgaaatgttgctggcgcttgaagatatgcacactgacctcatttacaacgtcggatggaacagaaacgggtcgttattagtcaccacatgtaaagataaaaaggtaagggttatcgaccctagaaagcaaacagttgttgcggaaatcacaaagccacatgatggtgctagaccaattagagctatattcatggccgatggtaagattttcacaaccggattctcaaaaatgtccgagagacaacttgggttgtgggatcttaaaaacttcgaggaaccaattgctctgcaggaaatggatactagtaatggtgttttgttaccattttacgacccagacacaaacatcgtttacctctgcggcaagggtgatagtagcatcagatattttgagataacagatgaagctccttacgtccattacttgaatacttactcctcaaaggaaccacagagaggtatgggattcatgccaaagcgaggactagatgtttctaagtgtgaaatcgctagatttttcaagttacatgagagaaaatgcgaacctattgtgatgacagtgcctagaaaatctgatttgttccaagatgatctatatccagatactcctggcccagaaccagcccttgaagctgatgaatggttatctggtaaagatgcagagccaatactaatttctcttagagatgggtacgtcccagtgaaaaacagagagttgaaagttgttaaaaaaaatattttggatagcaagcctcctccaggtcctcgtagatctcactccacatcaaacaccgatatatcaacaccagctttggatgaagttttagaggaaatccgggtgttgaaggaaactgtacaagcacaagagaagagaatctcagcactggaacataagctatgtcaatttactaatggtaccgactaa

SEQ ID NO: 7 - protein, 293 aa, Meleagris gallopavo
MPLAGTPAPLKRKKPTKLIGKLTHEVMPQEVTKLNLGKKISIPRDVMLEELSLLTNKGSKMFKLRQLRVEKFIYENNPDAFSDNSVDHFQRFIPSGGHYGEDAHGYGHGRMVGGVTAGQHGSSKQHYSTVPPRPGSKGGPGNSEGEHAEKSAGSAGEGGHGTEKDGKSGGKKPLLKTYISPWERAMGISPEDKSQLTIDLLSYSPKADFPHYKSFNRTAMPYGGYEKAAKRMTFKVPQFDICPLLPESIVLYNQNFRNRPSFNRTPIPWMPSGESSEYHTDINVPRSGETEEL

SEQ ID NO: 8 - DNA, 882 bp, Artificial Sequence
  Description of Artificial Sequence: Synthetic polynucleotide
atgcctttagccggaaccccagcaccattgaagagaaaaaagccaacaaaacttattggtaagctgacacacgaagttatgccacaggaagttaccaagttgaatctaggtaaaaagatttctatccctagagatgtcatgttggaagagttatcgttattgacgaacaaaggttccaaaatgttcaagttgagacaattaagagtcgagaaattcatttacgaaaacaatccagacgcattctccgataacagtgttgatcattttcaacgttttatcccatctggtggacattatggtgaagatgcccatgggtacggtcatggtcgtatggttgggggcgttacagccgggcaacatggttcatcaaagcaacattacagtaccgtgcctcctcgacctggttctaagggtggtccaggtaactctgagggtgaacatgctgaaaagtcagctgggtctgctggagagggcggccacggtacagaaaaggatggtaagagtggtggcaaaaagcctctacttaagacttacatcagcccatgggagagagcgatgggaatctcaccagaggataagagccagttaactattgatcttctatcatattcaccaaaggcagacttcccacactacaaatcttttaacagaacagcaatgccatacggcggatacgaaaaagctgctaagagaatgacatttaaggtacctcaattcgatatctgtccactgttgccagaatccatagtactctacaaccaaaatttcagaaacagaccatcattcaatagaactcctataccttggatgccatctggcgaatcttccgaataccacactgacattaacgtgccaagatctggagaaacagaggaattgtaa

SEQ ID NO: 9 - protein, 160 aa, Sus scrofa
MTDQQAEARSYLSEEMIAEFKAAFDMFDADGGGDISVKELGTVMRMLGQTPTKEELDAIIEEVDEDGSGTIDFEEFLVMMVRQMKEDAKGKSEEELAECFRIFDRNADGYIDAEELAEIFRASGEHVTDEELESLMKDGDKNNEGRIDFDEFLKMMEGVQ

SEQ ID NO: 10 - DNA, 483 bp, Artificial Sequence
  Description of Artificial Sequence: Synthetic polynucleotide
atgactgatcaacaagctgaagcaagatcttaccttagtgaagagatgatagcagagtttaaggcagcgttcgatatgttcgatgccgacggtggtggcgatatctctgtgaaggaactcggtacagttatgagaatgctggggcaaacaccaaccaaggaagagttggatgcaatcatcgaagaggtcgacgaagatgggtcaggtacaattgattttgaagagtttttggttatgatggtaagacagatgaaagaggatgctaagggtaagtcagaagaggaattagctgaatgttttagaattttcgatagaaatgctgatggatacattgacgctgaggaactagccgaaattttccgtgcctctggagaacatgtcactgatgaggaattggaatccttaatgaaagatggcgacaaaaacaacgagggtagaatcgacttcgacgaattccttaagatgatggaaggcgttcaataa

SEQ ID NO: 11 - DNA, 501 bp, Artificial Sequence
  Description of Artificial Sequence: Synthetic polynucleotide
atggcttctggtgtgactgttaacgacgaagtcatcaaggtattcaatgatatgaaagttagaaaatcatccactccagaggaaatcaaaaagagaaaaaaagccgttctattttgcctgtcggacgacaaaaagcagatcatcgttgaggaagccacacgtattttggtcggtgacattggtgacacagtcgaagatccttatactgcttttgttaagctgttgcccttaaatgattgtaggtacgctctgtacgacgcaacttacgaaaccaaagagtccaaaaaagaggatttggtgttcatcttctgggcacctgaaagtgctccacttaagagcaagatgatttatgcatcctctaaagatgctattaaaaaaaagtttacaggtataaagcatgagtggcaagtgaacggattggatgacattaaagatagatctacgttgggcgaaaagcttggtggaaatgttgtagtgtcattagagggaaagccactctaa

SEQ ID NO: 12 - DNA, 423 bp, Artificial Sequence
  Description of Artificial Sequence: Synthetic polynucleotide
atggccggttggcaatcctatgtagacaatctaatgtgtgacgggtgttgccaagaggcagcaattgtgggttactgcgatgctaaatacgtttgggcagcaacagccggcggaatcttccaatcaataaccccagtggaaattgatatgattgttggaaaagaccgtgagggatttttcactaatggtttgactctgggtgctaaaaagtgttccgttatccgtgatagcttgtatgtcgatggtgactgtactatggatatcaggacaaagtcgcagggtggtgaacctacgtataacgtagctgtcggtagagctggaagagtgttagtctttgttatgggtaaagagggtgttcatggcggtggacttaacaaaaaggcttacagtatggctaagtacttgagagactctggattctaa

SEQ ID NO: 13 - DNA, 32 bp, Artificial Sequence
  Description of Artificial Sequence: Synthetic primer
ataactcgagatggctggctggcaatcttatg

SEQ ID NO: 14 - DNA, 29 bp, Artificial Sequence
  Description of Artificial Sequence: Synthetic primer
tcccgggttaaaaaccggaatctctcaag

SEQ ID NO: 15 - DNA, 31 bp, Artificial Sequence
  Description of Artificial Sequence: Synthetic primer
tattctcgagacggattagaagccgccgagc

SEQ ID NO: 16 - DNA, 28 bp, Artificial Sequence
  Description of Artificial Sequence: Synthetic primer
tacagaattcttttgcgtgcaggtgagg

SEQ ID NO: 17 - DNA, 31 bp, Artificial Sequence
  Description of Artificial Sequence: Synthetic primer
tataagcttatggctggctggcaatcttatg

SEQ ID NO: 18 - DNA, 32 bp, Artificial Sequence
  Description of Artificial Sequence: Synthetic primer
ataccatatgttaaaaaccggaatctctcaag

SEQ ID NO: 19 - protein, 377 aa, Bos taurus
MCDEDETTALVCDNGSGLVKAGFAGDDAPRAVFPSIVGRPRHQGVMVGMGQKDSYVGDEAQSKKGILTLKYPIEHGIITNWDDMEKIWHHTFYNELRVAPEEHPTLLTEAPLNPKANREKMTQIMFETFNVPAMYVAIQAVLSLYASGRTTGIVLDSGDGVTHNVPIYEGYALPHAIMRLDLAGRDLTDYLMKILTERGYSFVTTAEREIVRDIKEKLCYVALDFENEMATAASSSSLEKSYELPDGQVITIGNERFRCPETLFQPSFIGMESAGIHETTYNSIMKCDIDIRKDLYANNVMSGGTTMYPGIADRMQKEITALAPSTMKIKIIAPPERKYSVWIGGSILASLSTFQQMWITKQEYDEAGPSIVHRKCF

SEQ ID NO: 20 - protein, 377 aa, Sus scrofa
MCDEDETTALVCDNGSGLVKAGFAGDDAPRAVFPSIVGRPRHQGVMVGMGQKDSYVGDEAQSKRGILTLKYPIEHGIITNWDDMEKIWHHTFYNELRVAPEEHPTLLTEAPLNPKANREKMTQIMFETFNVPAMYVAIQAVLSLYASGRTTGIVLDSGDGVTHNVPIYEGYALPHAIMRLDLAGRDLTDYLMKILTERGYSFVTTAEREIVRDIKEKLCYVALDFENEMATAASSSSLEKSYELPDGQVITIGNERFRCPETLFQPSFIGMESAGIHETTYNSIMKCDIDIRKDLYANNVMSGGTTMYPGIADRMQKEITALAPSTMKIKIIAPPERKYSVWIGGSILASLSTFQQMWITKQEYDEAGPSIVHRKCF

SEQ ID NO: 21 - protein, 377 aa, Gallus gallus; identical to SEQ ID NO: 20

SEQ ID NO: 22 - protein, 377 aa, Bos taurus; identical to SEQ ID NO: 20

SEQ ID NO: 23 - protein, 168 aa, Gallus gallus
MAPKKAKRRAAEGSSNVFSMFDQTQIQEFKEAFTVIDQNRDGIIDKDDLRETFAAMGRLNVKNEELDAMIKEASGPINFTVFLTMFGEKLKGADPEDVIMGAFKVLDPDGKGSIKKSFLEELLTTQCDRFTPEEIKNMWAAFPPDVAGNVDYKNICYVITHGEDKEGE

SEQ ID NO: 24 - protein, 1940 aa, Gallus gallus
MSSDAEMAIFGEAAPYLRKSEKERIEAQNKPFDAKTSVFVVHAKESYVKSTIQSKESGKVTVKTESGETLTVKEDQIFSMNPPKYDKIEDMAMMTHLHEPAVLYNLKERYAAWMIYTYSGLFCVTVNPYKWLPVYNPEVVLAYRGKKRQEAPPHIFSISDNAYQFMLTDRENQSILITGESGAGKTVNTKRVIQYFATIAASGDKKKEEQPAGKMQGTLEDQIISANPLLEAFGNAKTVRNDNSSRFGKFIRIHFGATGKLASADIETYLLEKSRVTFQLKAERSYHIFYQIMSNKKPELIEMLLITTNPYDYHYVSQGEITVPSINDQEELMATDSAIDILGFTPDEKTAIYKLTGAVMHYGNLKFKQKQREEQAEPDGTEVADKAAYLMGLNSADLLKALCYPRVKVGNEFVTKGQTVQQVYNSVGALAKAVFEKMFLWMVVRINQQLDTKQPRQYFIGVLDIAGFEIFDFNSLEQLCINFTNEKLQQFFNHHMFVLEQEEYKKEGIEWEFIDFGMDLAACIELIEKPMGIFSILEEECMFPKATDTSFKNKLYDQHLGKSNNFQKPKPGKGKAEAHFSLVHYAGTVDYNISGWLDKNKDPLYETVVGLYQKSSLKTLALLFASAGGEAESGGGGKKGGKKKGSSFQTVSALFRENLNKLMTNLRSTHPHFVRCIIPNETKTPGAMEHELVLHQLRCNGVLEGIRICRKGFPSRILYADFKQRYKVLNASAIPEGQFIDSKKASEKLLGSIDVDHTQYKFGHTKVFFKAGLLGLLEEMRDEKLAQLITRTQARCRGFLMRVEYRRMVERRESIFCIQYNIRSFMNVKHWPWMKLFFKIKPLLKSAESEKEMANMKGEFEKTKEELAKSGAKRKDLEGKMVSLLQEKNDLQLQVQAEADALADAEERCDQLIKTKIQLEAKIKEVTERAEDEEEINAELTAKKRKLEDECSELKKDIDDLELTLAKVEKEKHATENKVKNLTEEMAALDENIAKLTKEKKAPQEAHQQTLDDLQAEEDKVNTLTKAKTKLEQQVDDLEGSLEQEKKLRMDLERAKRKLEGDLKLAHDSIMDLENDKQQLDEKLKKKDFEISQIQSKIEDEQALGMQLQKKIKELQARTEELEEEIEAERTSRAKAEKHRADLSRELEEISERLEEAGGATAAQIDMNKKREAEFQKMRRDLEEATLQHEATAAALRKKHADSTAELGEQIDNLQRVKQKLEKEKSELKMEIDDLASNMESVSKAKASLEKTCRALEDQMSEIKTKEEEHQRMINDVNAQRARLQTESGEYSRQVEEKDALISQLSRGKQAFTQQIEELKRHLEEEIKAKNALAHGLQSARHDCDLLREQYEEEQEAKGELQRALSKANSEVAQWRTKYETDAIQRTEELEEAKKKLAQRLQDAEEHVEAVNSKCASLEKTKQRLQNEVEDLMIDVERANSACAALDKKQKNFDKILSEWKQKYEETQAELEASQKESRSLSTELFKMKNAYEESLDHLETLKRENKNLQQEISDLTEQIAEGGKAIHELEKVKKQIEQEKSELQASLEEAEASLEHEEGKILRLQLELNQVKSEIDRKIAEKDEEIDQLKRNHLRIVESMQRTLDAEVRSRNEALRLKKKMEGDLNEMEIQLNHANRMAAEAQKNLRNTQGVLKDTQIHLDDALRSQEDLKEQVAMVERRANLLQAETEELRAALEQTERSRKVAEQELLDASERVQLLHTQNTSLINTKKKLESDISQIQSEMEDTIQEARNAEEKAKKAITDAAMMAEELKKEQDTSAHLERMKKNLDQTVKDLQHRLDEAEQLALKGGKKQIQKLEARVRELEGEVDAEQKRSAEAVKGVRKYERRVKELTYQSEEDRKNVLRLQDLVDKLQMKVKSYKRQAEEAEELSNVNLSKFRKIQHELEEAEERADIAESQVNKLRVKSREFHKKIEEEEI

SEQ ID NO: 25 - protein, 1937 aa, Salmo salar
MSTDAEMQVYGKAAIYLRKSEKERMEAQAMPFDSKNSCYVTDKVELYLKGLVTARADGKCTVTVTKPDGTKEEGKEFKDADIYEMNPPKYDKIEDMAMMTYLNEASVLYNLKERYAAWMIYTYSGLFCATVNPYKWLPVYDEEVVNAYRGKKRVEAPPHIFSVSDNAFQFMMIDKENQSVLITGESGAGKTVNTKRVIQYFATIAVSGGKKEADPNKMQGSLEDQIIAANPLLESYGNAKTVRNDNSSRFGKFIRIHFQAGKLAKADIETYLLEKSRVSFQLPDERGYHIFFQMMTGHKPELVELALLTTNPYDFPMCSQGQIAVASINDNEELDATDEAITILGFTNEEKLGIYKLTGAVVHHGNLKFKQKQREEQAEPDGTEVADKIAYLLGLNSAEMLKALCYPRVKVGNEYVTKGQTVAQVNNSVSALAKSIYERMFLWMVIRINEMLDTKNPRQFYIGVLDIAGFEIFDYNSMEQLCINFTNEKLQQFFNHTMFVLEQEEYKKEGIVWAFIDFGMDLAACIELIEKPLGIFSILEEECMFPKSSDTTFKDKLYAQHLGKTKAFEKPKPAKGKAEAHFSLVHYAGTVDYNITGWLEKNKDPLNDSVCQLYGKSGVKILAALYPPPPPEDKAKKGGKKKGGSMQTVSSQFRENLHKLMTNLRSTHPHFVRCLIPNESKTPGLMENFLVIHQLRCNGVLEGIRICRKGFPSRIIYADFKQRYKVLNASVIPEGQFMDNKKASEKLLGSIDVNHEDYKFGHTKVFFKAGLLGVLEEMRDEKLATLVGMVQALSRGFLMRREFSKMMERRESIYAIQYNIRSFMNVKTWPWMKLYFKIKPLLQSAETEKELANMKENYEKMKTDLAKALSTKKQMEEKLVSLTQEKNDLALQVASEGESLNDAEERCEGLIKSKIQQEAKLKETTERLEDEEEINAELTAKKRKLEDECSELKKDIDDLELTLAKVEKEKHATENKVKNLTEEMASMDESVAKLTKEKKALQEAHQQTLDDLQAEEDKVNTLTKAKTKLEQQVDDLEGSLEQEKKLRMDLERAKRKLEGDLKLAQESIMDLENDKQQADEKIKKKEFETTQLLSKIEDEQSLGAQLQKKIKELQARIEELEEEIEAERAARAKVEKQRADLSRELEEISERLEEAGGATAAQIEMNKKREAEFQKLRRDLEESTLQHEATAAALRKKQADSVAELGEQIDNLQRVKQKLEKEKSEYKMEIDDLSSNMEAVAKAKGNLEKMCRTLEDQLSELKTKNDENVRQVNDISGQRARLLTENGEFGRQLEEKEALVSQLTRGKQAFTQQVEELKRLIEEEVKAKNALAHGVQSARHDCDLLREQFEEEQEAKAELQRGMSKANSEVAQWRTKYETDAIQRTEELEEAKKKLAQRLQEAEETIEATNSKCASLEKTKQRLQGEVEDLMIDVERANALAANLDKKQRNFDKVLAEWKQKYEEGQAELEGAQKEARSMSTELFKMKNSYEEALDHLETLKRENKNLQQEISDLTEQIGETGKSIHELEKAKKTVETEKSEIQTALEEAEGTLEHEESKILRVQLELNQIKGEVDRKIAEKDEEMEQIKRNSQRVVDSMQSTLDSEVRSRNDALRVKKKMEGDLNEMEIQLSHSNRQAAEAQKQLRNVQGQLKDAQLHLDDAVRAAEDMKEQAAMVERRNGLMVAEIEELRVALEQTERGRKVAETELVDASERVGLLHSQNTSLLNTKKKLETDLVQVQGEVDDIVQEARNAEEKAKKAITDAAMMAEELKKEQDTSSHLERMKKNLEVTVKDLQHRLDEAENLAMKGGKKQLQKLESRVRELETEVEAEQRRGVDAVKGVRKYERRVKELTYQTEEDKKNVNRLQDLVDKLQMKVKAYKRQAEEAEEAANQHMSKFRKVQHELEEAEERADIAETQVNKLRAKTRDSGKGKEAAE

SEQ ID NO: 26 - protein, 832 aa, Salmo salar
MSTDAEMQIYGKAAIYLRKSEKERMEAQAAPFDSKNSCYVADKVELYLKGLITARADGKCTVTVTKPDGTKEEGKEFKDADIYEMNPPKYDKIEDMAMMTYLNEASVLYNLKERYAAWMIYTYSGLFCATVNPYKWLPVYDAEVVNAYRGKKRMEAPPHIFSVSDNAFQFMLIDKENQSVLITGESGAGKTVNTKRVIQYFATIAVSGGEKKKEVDPSKMQGSLEDQIIAANPLLEAYGNAKTVRNDNSSRFGKFIRIHFQGGKLAKADIETYLLEKSRVSFQLPDERGYHIFFQMMTGHKPEIVEMALITTNPYDFPMCSQGQIAVASIDDKEELDATDDAITILGFTNDEKIGIYKLTGAVVHHGNLKFKQKQREEQAEPDGTEVADKIGYLLGLNSAEMLKALCYPRVKVGNEYVTKGQTVPQVNNSVMALAKSIYERMFLWMVIRINEMLDTKNPRQFYIGVLDIAGFEIFDYNSMEQLCINFTNEKLQQFFNHTMFVLEQEEYKKEGIVWAFIDFGMDLAACIELIEKPLGIFSILEEECMFPKSSDTTFKDKLYSQHLGKTQAFEKPKPAKGKAEAHFSLVHYAGTVDYNITGWLEKNKDPLNDSVCQLYGKSGVKILAALYPAAPPEDTTKKGGKKKGGSMQTVSSQFRENLHKLMTNLRSTHPHFVRCLIPNESKTPGLMENFLVIHQLRCNGVLEGIRICRKGFPSRIIYADFKQRYKVLNASVIPEGQFMDNKKASEKLLGSIDVNHEDYKFGHTKVSQILYFKIKPLLQSAETEKELANMKENYEKMTADLAKALSTKKQMEEKLVALMQEKNDLALQVAS

SEQ ID NO: 27 - protein, 192 aa, Gallus gallus
MAPKKDVKKPAAAAAPAPAPAPAPAPAPAKPKEPAIDLKSIKIEFSKEQQDDFKEAFLLFDRTGDAKITLSQVGDIVRALGQNPTNAEINKILGNPSKEEMNAKKITFEEFLPMLQAAANNKDQGTFEDFVEGLRVFDKEGNGTVMGAELRHVLATLGEKMTEEEVEELMKGQEDSNGCINYEAFVKHIMSV

SEQ ID NO: 28 - protein, 150 aa, Gallus gallus
MSFSPDEINDFKEAFLLFDRTGDAKITLSQVGDIVRALGQNPTNAEINKILGNPSKEEMNAKKITFEEFLPMLQAAANNKDQGTFEDFVEGLRVFDKEGNGTVMGAELRHVLATLGEKMTEEEVEELMKGQEDSNGCINYEAFVKHIMSV

SEQ ID NO: 29 - protein, 161 aa, Salmo salar
MADAAPAEASGASAFTADQIEDFKEAFGLFDRVGDSMIGYNQVADVMRALGQNPQNKEVAAILGKPSADDMANKRLAFADFMPMMEKVDKIVKGTLDDYVEGLRVFDKEGNGTVSGAELRIVLGTLGEKMSEAEIDSLLIGQEDENGSINYEAFVKHVLSV

SEQ ID NO: 30 - protein, 1939 aa, Gallus gallus
MASPDAEMAAFGEAAPYLRKSEKERIEAQNKPFDAKSSVFVVHPKESFVKGTIQSKEGGKVTVKTEGGETLTVKEDQVFSMNPPKYDKIEDMAMMTHLHEPAVLYNLKERYAAWMIYTYSGLFCVTVNPYKWLPVYNPEVVLAYRGKKRQEAPPHIFSISDNAYQFMLTDRENQSILITGESGAGKTVNTKRVIQYFATIAASGEKKKEEQSGKMQGTLEDQIISANPLLEAFGNAKTVRNDNSSRFGKFIRIHFGATGKLASADIETYLLEKSRVTFQLPAERSYHIFYQIMSNKKPELIDMLLITTNPYDYHYVSQGEITVPSIDDQEELMATDSAIDILGFSADEKTAIYKLTGAVMHYGNLKFKQKQREEQAEPDGTEVADKAAYLMGLNSAELLKALCYPRVKVGNEFVTKGQTVSQVHNSVGALAKAVYEKMFLWMVIRINQQLDTKQPRQYFIGVLDIAGFEIFDFNSFEQLCINFTNEKLQQFFNHHMFVLEQEEYKKEGIEWEFIDFGMDLAACIELIEKPMGIFSILEEECMFPKATDTSFKNKLYDQHLGKSNNFQKPKPAKGKAEAHFSLVHYAGTVDYNISGWLEKNKDPLNETVIGLYQKSSVKTLALLFATYGGEAEGGGGKKGGKKKGSSFQTVSALFRENLNKLMANLRSTHPHFVRCIIPNETKTPGAMEHELVLHQLRCNGVLEGIRICRKGFPSRVLYADFKQRYRVLNASAIPEGQFMDSKKASEKLLGSIDVDHTQYRFGHTKVFFKAGLLGLLEEMRDDKLAEIITRTQARCRGFLMRVEYRRMVERRESIFCIQYNVRSFMNVKHWPWMKLFFKIKPLLKSAESEKEMANMKEEFEKTKEELAKSEAKRKELEEKMVVLLQEKNDLQLQVQAEADSLADAEERCDQLIKTKIQLEAKIKEVTERAEDEEEINAELTAKKRKLEDECSELKKDIDDLELTLAKVEKEKHATENKVKNLTEEMAVLDETIAKLTKEKKALQEAHQQTLDDLQVEEDKVNTLTKAKTKLEQQVDDLEGSLEQEKKLRMDLERAKRKLEGDLKLAHDSIMDLENDKQQLDEKLKKKDFEISQIQSKIEDEQALGMQLQKKIKELQARIEELEEEIEAERTSRAKAEKHRADLSRELEEISERLEEAGGATAAQIEMNKKREAEFQKMRRDLEEATLQHEATAAALRKKHADSTAELGEQIDNLQRVKQKLEKEKSELKMEIDDLASNMESVSKAKANLEKMCRTLEDQLSEIKTKEEQNQRMINDLNTQRARLQTETGEYSRQAEEKDALISQLSRGKQGFTQQIEELKRHLEEEIKAKNALAHALQSARHDCELLREQYEEEQEAKGELQRALSKANSEVAQWRTKYETDAIQRTEELEEAKKKLAQRLQDAEEHVEAVNAKCASLEKTKQRLQNEVEDLMVDVERSNAACAALDKKQKNFDKILAEWKQKYEETQTELEASQKESRSLSTELFKMKNAYEESLDHLETLKRENKNLQQEIADLTEQIAEGGKAVHELEKVKKHVEQEKSELQASLEEAEASLEHEEGKILRLQLELNQIKSEIDRKIAEKDEEIDQLKRNHLRIVESMQSTLDAEIRSRNEALRLKKKMEGDLNEMEIQLSHANRMAAEAQKNLRNTQGTLKDTQIHLDDALRTQEDLKEQVAMVERRANLLQAEVEELRGALEQTERSRKVAEQELLDATERVQLLHTQNTSLINTKKKLETDIVQIQSEMEDTIQEARNAEEKAKKAITDAAMMAEELKKEQDTSAHLERMKKNMDQTVKDLHVRLDEAEQLALKGGKKQLQKLEARVRELEGEVDSEQKRSAEAVKGVRKYERRVKELTYQCEEDRKNILRLQDLVDKLQMKVKSYKRQAEEAEELSNVNLSKFRKIQHELEEAEERADIAESQVNKLRVKSREIHGKKIEEEE

SEQ ID NO: 31 - protein, 947 aa, Gallus gallus
MRDLLVVPLGHVLTLAALSLAETLQKAPFISTPLETVDALVEDVPKFVCVVESYPEPEITWTRNSIPIRLFDTRYSIQRNGQLLTILSVEDSDDGVYCCTADNGVGAAAQSCGALQVKMRPKITRPPVNVEIIEGLKAVLPCTTMGNPKPSVSWIKGETVVKENARIAVLDSGNLRIHNVQREDAGQYRCVAKNSLGSAYSKPATVVVEVFARILKAPESQNITFGSMVTLRCTAAGAPVPTVTWLENGKAVSAGSIAESVKDRVVDSRLQVYVTRPGLFTCLATNKHSKTFGAAKAAATISVSEWSKLYKGDAGYCSTYRGEVCSAILSRNALVFFNSSYADPEETQELLVHTAWTELKTVSSFCQPAAESLLCNYIFQECKPSGVGPAPKPICRENCLAVKDLYCFKEWLSMEENSQRGIYKPGLMLLALPECNRLPSLHQDPSACTHIPFFDFKKENITRTCYSGNGQFYQGWANVTASGIPCQKWSDQAPHLHRRTPQVFPELSDAENYCRNPGGENERPWCYTKDPSVTWEYCSVSPCGDASLSLGTRKPNGETQNLPPPPSYSPTYSMNVIILIISSFALIVILGIITLVCCRRRKQWKNKKRESETPTLTTLPSELLLDRLHPNPMYQRMPLLLNPKLLSLEYPRNNIEYVRDIGEGAFGRVFQARAPGLLPYEPFTMVAVKMLKEEASADMQADFQREAALMAEFDNPNIVKLLGVCAVGKPMCLLFEYMAYGDLNEYLRDRSPRNLCSLVQGGLEARACLLNPLALCCTSQLCIAKQVAAGMAYLSERKFVHRDLATRNCLVGENMVVKIADFGLSRNMYSADYYKANENDAIPIRWMPPESIFYNRYTTESDVWAYGVVLWEIFSYGMQPYYGMAHEEVIYYVRDGNILSCPDNCPLELYNLMRLCWSKLPADRPSFASIHRILERMYERAVASPQV

SEQ ID NO: 32 - protein, 163 aa, Gallus gallus
MASMTDQQAEARAFLSEEMIAEFKAAFDMFDADGGGDISTKELGTVMRMLGQNPTKEELDAIIEEVDEDGSGTIDFEEFLVMMVRQMKEDAKGKSEEELANCFRIFDKNADGFIDIEELGEILRATGEHVTEEDIEDLMKDSDKNNDGRIDFDEFLKMMEGVQ

SEQ ID NO: 33 - protein, 159 aa, Sus scrofa
TDQQAEARSYLSEEMIAEFKAAFDMFDADGGGDISVKELGTVMRMLGQTPTKEELDAIIEEVDEDGSGTIDFEEFLVMMVRQMKEDAKGKSEEELAECFRIFDRNMDGYIDAEELAEIFRASGEHVTDEEIESIMKDGDKNNDGRIDFDEFLKMMEGVQ

SEQ ID NO: 34 - protein, 183 aa, Gallus gallus
MSDEEKKRRAATARRQHLKSAMLQLAVTEIEKEAAAKEVEKQNYLAEHCPPLSLPGSMQELQELCKKLHAKIDSVDEERYDTEVKLQKTNKELEDLSQKLFDLRGKFKRPPLRRVRMSADAMLRALLGSKHKVNMDLRANLKQVKKEDTEKEKDLRDVGDWRKNIEEKSGMEGRKKMFEAGES

SEQ ID NO: 35 - protein, 183 aa, Coturnix japonica; identical to SEQ ID NO: 34

SEQ ID NO: 36 - protein, 271 aa, Bos taurus
MSDEEVEHVEEEYEEEEEAQEEAPPPPAEVPEVHEEVHEVHEPEEVQEEEKPRPRLTAPKIPEGEKVDFDDIQKKRQNKDLMELQALIDSHFEARKKEEEELVALKERIEKRRAERAEQQRIRAEKERERQNRLAEEKARREEEDAKRRAEDDLKKKKALSSMGANYSSYLAKADQKRGKKQTAREMKKKVLAERRKPLNIDHLSEDKLRDKAKELWDTLYQLETDKFEYGEKLKRQKYDITNLRSRIDQAQKHSKKAGTAPKGKVGGRWK

SEQ ID NO: 37 - protein, 262 aa, Sus scrofa
MSDAEEQEYEEEQPEEEEAAEEEEAPEEPEPVAEREEERPKPSRPVVPPLIPPKIPEGERVDFDDIHRKRMEKDLLELQTLIDVHFEQRKKEEEELVALKERIERRRAERAEQQRFRTEKERERQAKLAEEKMRKEEEEAKKRAEDDAKKKKVLSNMGAHFGGYLVKAEQKRGKRQTGREMKQRILSERKKPLNIDHMGEDQLREKAQELSDWIHQLESEKFDLMAKLKQQKYEINVLYNRISHAQKFRKGAGKGRVGGRWK

SEQ ID NO: 38 - protein, 347 aa, Gallus gallus
MTSYRQELEKYRDIDEDKILQELSAEELEQLDTELLEMDPENVLLPAGLRQRDQTQKSPTGPLDREALLQHLEKQALEAKEREDLVPFTGEKKGKPFVPKNPTREIPREEQITLEPELEEALANATEAEMCDIAAILGMYTLMSNKQYYDAICSGTITNTEGINSVVKPDKYKPVPDEPPNPTNVEETLRQIQANDSALEDVNLNNIKDIPISTLKAICEAMKTNTHVKKLSLVATRSNDPVATAVAEMLAENKTLQSLNIESNFITSAGMMSVIKAMYQNSTLSELKVDNQCQRLGNTVEMEMATMLEQCPSVVRFGYHFTQQGPRARAAIAITRNNELRRKQKKT

SEQ ID NO: 39 - protein, 377 aa, Gallus gallus; identical to SEQ ID NO: 20

SEQ ID NO: 40 - protein, 897 aa, Gallus gallus
MNSMNQIETNMQYTYNYEEDEYMTQEEEWDRDLLLDPAWEKQQRKTFTAWCNSHLRKAGTQIENIEEDFRNGLKLMLLLEVISGERLPKPDRGKMRFHKIANVNKALDYIASKGVKLVSIGAEEIVDGNVKMTLGMIWTIILRFAIQDISVEETSAKEGLLLWCQRKTAPYRNVNIQNFHLSWKDGLGLCALIHRHRPDLIDYSKLNKDDPIGNINLAMEIAEKHLDIPKMLDAEDIVNTPKPDERAIMTYVSCFYHAFAGAEQAETAANRICKVLAVNQENERLMEEYERLASELLEWIRRTIPWLENRTPEKTMQAMQKKLEDFRDYRRKHKPPKVQEKCQLEINFNTLQTKLRISNRPAFMPSEGKMVSDIAGAWQRLEQAEKGYEEWLLNEIRRLERLEHLAEKFRQKASTHEQWAYGKEQILLQKDYESASLTEVRAMLRKHEAFESDLAAHQDRVEQIAAIAQELNELDYHDAASVNDRCQKICDQWDSLGTLTQKRREALERTEKLLETIDQLHLEFAKRAAPFNNWMEGAMEDLQDMFIVHSIEEIQSLISAHDQFKATLPEADGERQAILSIQNEVEKVIQSYSMRISASNPYSTVTVEEIRTKWEKVKQLVPQRDQSLQEELARQHANERLRRQFAAQANVIGPWIQTKMEEIARSSIEMTGPLEDQMNQLKQYEQNIINYKHNIDKLEGDHQLIQEALVFDNKHTNYTMEHIRVGWELLLTTIARTINEVETQILTRDAKGITQEQMNDFRASFNHFDRRKNGLMDHDDFRACLISMGYDLGEAEFARIMSLVDPNGQGTVTFQSFIDFMTRETADTDTAEQVIASFRILASDKPYILADELRRELPPEQAQYCIKRMPQYTGPGSVPGALDYTSFSSALYGESDL

SEQ ID NO: 41 - protein, 923 aa, Gallus gallus
MNSMNQIETNMQYTYNYEEDEYMTQEEEWDRDLLLDPAWEKQQRKTFTAWCNSHLRKAGTQIENIEEDFRNGLKLMLLLEVISGERLPKPDRGKMRFHKIANVNKALDYIASKGVKLVSIGAEEIVDGNVKMTLGMIWTIILRFAIQDISVEETSAKEGLLLWCQRKTAPYRNVNIQNFHLSWKDGLGLCALIHRHRPDLIDYSKLNKDDPIGNINLAMEIAEKHLDIPKMLDAEDIVNTPKPDERAIMTYVSCFYHAFAGAEQAETAANRICKVLAVNQENERLMEEYERLASELLEWIRRTIPWLENRTPEKTMQAMQKKLEDFRDYRRKHKPPKVQEKCQLEINFNTLQTKLRISNRPAFMPSEGKMVSDIAGAWQRLEQAEKGYEEWLLNEIRRLERLEHLAEKFRQKASTHEQWAYGKEQILLQKDYESASLTEVRAMLRKHEAFESDLAAHQDRVEQIAAIAQELNELDYHDAASVNDRCQKICDQWDSLGTLTQKRREALERTEKLLETIDQLHLEFAKRAAPFNNWMEGAMEDLQDMFIVHSIEEIQSLISAHDQFKATLPEADGERQAILSIQNEVEKVIQSYSMRISASNPYSTVTVEEIRTKWEKVKQLVPQRDQSLQEELARQHANERLRRQFAAQANVIGPWIQTKMEEIARSSIEMTGPLEDQMNQLKQYEQNIINYKHNIDKLEGDHQLIQEALVFDNKHTNYTMEHIRVGWELLLTTIARTINEVETQILTRDAKGITQEQMNDFRASFNHFDRRKNGLMDHDDFRACLISMGYDLDESDNLHSDEFKACLISLGEVGNDLQGEAEFARIMSLVDPNGQGTVTFQSFIDFMTRETADTDTAEQVIASFRILASDKPYILADELRRELPPEQAQYCIKRMPQYTGPGSVPGALDYTSFSSALYGESDL

SEQ ID NO: 42 - protein, 286 aa, Gallus gallus
MADFEDRVSDEEKVRIAAKFITHAPPGEFNEVFNDVRLLLNNDNLLREGAAHAFAQYNMDQFTPVKIEGYDDQVLITEHGDLGNGRFLDPRNKISFKFDHLRKEASDPQPEDTESALKQWRDACDSALRAYVKDHYPNGFCTVYGKSIDGQQTIIACIESHQFQPKNFWNGRWRSEWKFTITPPTAQVAAVLKIQVHYYEDGNVQLVSHKDIQDSVQVSSDVQTAKEFIKIIENAENEYQTAISENYQTMSDTTFKALRRQLPVTRTKIDWNKILSYKIGKEMQNA

SEQ ID NO: 43 - protein, 286 aa, Gallus gallus
MADLEEQLSDEEKVRIAAKFIIHAPPGEFNEVFNDVRLLLNNDNLLREGAAHAFAQYNLDQFTPVKIDGYDEQVLITEHGDLGNGKFLDPKNKISFKFDHLRKEATDPRPHEVENAIESWRNSVETAMKAYVKEHYPNGVCTVYGKTIDGQQTIIACIESHQFQAKNFWNGRWRSEWKFTISPSTTQVAGILKIQVHYYEDGNVQLVSHKDIQDSLTVSNEAQTAKEFIKIVEAAENEYQTAISENYQTMSDTTFKALRRQLPVTRTKIDWNKILSYKIGKEMQNA

SEQ ID NO: 44 - protein, 286 aa, Gallus gallus; identical to SEQ ID NO: 43

SEQ ID NO: 45 - protein, 290 aa, Gallus gallus
MSVGQGLCESEKVSLICGLMRQSPPGEFRQVVQDLCDLLQDDELVKQQAARAGARHNKNNFTPVLVNGNTVLLTQYNDLGGNRFFYPQDKFSFEFDHLSGVTSKTHLHRVMLDEGELWRGALHKGLNAYVNYHFPVGNCCVFKKSLGKRQMLVACIEAHQYQPSKHWNSLWKSDWTFSLTPVMTRVTGIFLLQLHYFRNANLHVTISKSVSESLHVIDRNQFVTDFVKFVKTEDNKIHNAILENIQALSEHTWRKNLRRRLPITRTFMNWNELLNNQHLKTGVSRKEVPP

SEQ ID NO: 46 - protein, 1940 aa, Gallus gallus
MATDADMAIFGEAAPYLRKSEKERIEAQNKPFDAKSSVFVVHAKESYVKSTIQSKESGKVTVKTEGGETLTVKEDQIFSMNPPKYDKIEDMAMMTHLHEPAVLYNLKERYAAWMIYTYSGLFCVTVNPYKWLPVYNPEVVLAYRGKKRQEAPPHIFSISDNAYQFMLTDRENQSILITGESGAGKTVNTKRVIQYFATIAASGDKKKEEQPAGKMQGTLEDQIISANPLLEAFGNAKTVRNDNSSRFGKFIRIHFGATGKLASADIETYLLEKSRVTFQLKAERSYHIFYQIMSNKKPELIEMLLITTNPYDYQYVSQGEITVPSINDQEELMATDSAIDILGFTPDEKTAIYKLTGAVMHYGNLKFKQKQREEQAEPGGTEVADKAAYLMGLNSADLLKALCYPRVKVGNEYVTKGQTVQQVYNSVGALAKSVFEKMFLWMVVRINQQLDTKQPRQYFIGVLDIAGFEIFDFNSLEQLCINFTNEKLQQFFNHHMFVLEQEEYKKEGIEWEFIDFGMDLAACIELIEKPMGIFSILEEECMFPKATDTSFKNKLYDQHLGKSNNFQKPKPGKGKAEAHFSLVHYAGTVDYNITGWLEKNKDPLNETVVGLYQKSSLKTLALLFASVGGAEAESGAGGKKGGKKKGSSFQTVSALFRENLNKLMSNLRSTHPHFVRCLIPNETKTPGAMEHELVLHQLRCNGVLEGIRICRKGFPIRILYADFKQRYKVLNASAIPEGQFIDSKKASEKLLGSIDVDHTQYKFGHTKVFFKAGLLGLLEEMRDEKLAQLITRTQARCRGFLMRVEFKKMMERRESIFCIQYNVRAFMNVKHWPWMKLFFKIKPLLKSAESEKEMANMKEEFEKTKEELAKSEAKRKELEEKMVSLLQEKNDLQLQVQAEADGLADAEERCDQLIKTKIQLEAKIKELTERAEDEEEMNAELTAKKRKLEDECSELKKDIDDLELTLAKVEKEKHATENKVKNLTEEMAALDETIAKLTKEKKALQEAHQQTLDDLQAEEDKVNTLTKAKTKLEQQVDDLEGSLEQEKKLRMDLERAKRKLEGDLKMTQESTMDLENDKQQLDEKLKKKDFEISQIQSKIEDEQALGMQLQKKIKELQARIEELEEEIEAERTSRAKAEKHRADLSRELEEISERLEEAGGATAAQIDMNKKREAEFQKMRRDLEEATLQHEATAAALRKKHADSTADVGEQIDNLQRVKQKLEKEKSELKMEIDDLASNMESVSKAKANLEKMCRSLEDQLSEIKTKEEEQQRTINDISAQKARLQTESGEYSRQVEEKDALISQLSRGKQAFTQQIEELKRHLEEEIKAKKCPAHALQSARHDCDLLREQYEEEQEAKGELQRALSKANSEVAQWRTKYETDAIQRTEELEEAKKKLAQRLQDAEEHVEAVNSKCASLEKTKQRLQNEVEDLMIDVERSNAACAALDKKQKNFDKILSEWKQKYEETQAELEASQKESRSLSTELFKMKNAYEESLDHLETLKRENKNLQQEISDLTEQIAEGGKAIHELEKVKKQIEQEKSELQTALEEAEASLEHEEGKILRVQLELNQVKSDIDRKIAEKDEEIDQLKRNHLRVVDSMQSTLDAEIRSRNEALRLKKKMEGDLNEIEIQLSHANRQAAEAQKNLRNTQGVLKDTQIHLDDALRSQEDLKEQVAMVERRANLLQAEIEELRAALEQTERSRKVAEQELLDASERVQLLHTQNTSLINTKKKLESDISQIQSEMEDTIQEARNAEEKAKKAITDAAMMAEELKKEQDTSAHLERMKKNLDQTVKDLQHRLDEAEQLALKGGKKQIQKLEARVRELEGEVDAEQKRSAEAVKGVRKYERRVKELTYQSEEDRKNVLRLQDLVDKLQMKVKSYKRQAEEAEELSNVNLSKFRKIQHELEEAEERADIAESQVNKLRAKSREIGKKAESEE

SEQ ID NO: 47 - protein, 1939 aa, Sus scrofa
MSSDQEMAIFGEAAPYLRKSEKERIEAQNRPFDAKTSVFVAEPKESFVKGTIQSREGGKVTVKTEAGATLTVKEDQVFPMNPPKFDKIEDMAMMTHLHEPGVLYNLKERYAAWMIYTYSGLFCVTVNPYKWLPVYNPEVVTAYRGKKRQEAPPHIFSISDNAYQFMLTDRENQSILITGESGAGKTVNTKRVIQYFATIAVTGEKKKEEPTSGKMQGTLEDQIISANPLLEAFGNAKTVRNDNSSRFGKFIRIHFGTTGKLASADIETYLLEKSRVTFQLKAERSYHIFYQITSNRKPELIEMLLITTNPYDYPFISQGEISVASIDDQEELIATDSAIDILGFTNEEKVSIYKLTGAVMHYGNLKFKQKQREEQAEPDGTEVADKAAYLQSLNSADLLKALCYPRVKVGNEYVTKGQTVEQVTNAVGALAKAVYEKMFLWMVTRINQQLDTKQPRQYFIGVLDIAGFEIFDFNSLEQLCINFTNEKLQQFFNHHMFVLEQEEYKREGIEWTFIDFGMDLAACIELIEKPMGIFSILEEECMFPKATDTSFKNKLYEQHLGKSANFQKPKPAKGKVEAHFSLIHYAGTVDYNITGWLDKNKDPLNDTVVGLYQKSALKTLAFLFSGAQTGEAEAGGTKKGGKKKGSSFQTVSALFRENLNKLMTNLRSTHPHFVRCIIPNETKTPGAMEHELVLHQLRCNGVLEGIRICRKGFPSRILYADFKQRYKVLNASAIPEGQYIDSKKASEKLLASIDIDHTQYKFGHTKVFFKAGLLGLLEEMRDDKLAQLITRTQARCRGFLARVEYQKMVERRESIFCIQYNIRAFMNVKHWPWMKLFFKIKPLLKSAESEKEMATMKEEFQKTKDELAKSEAKRKELEEKMVTLLKEKNDLQLQVQAEAEGLADAEERCDQLIKTKIQLEAKIKEVTERAEDEEEINAELTAKKRKLEDECSELKKDIDDLELTLAKVEKEKHATENKVKNLTEEMAGLDETIAKLTKEKKALQEAHQQTLDDLQAEEDKVNTLTKAKTKLEQQVDDLEGSLEQEKKLRMDLERAKRKLEGDLKLAQESIMDIENEKQQLDEKLKKKEFEISNLQSKIEDEQALAIQLQKKIKELQARIEELEEEIEAERASRAKAEKQRSDLSRELEEISERLEEAGGATSAQIEMNKKREAEFQKMRRDLEEATLQHEATAAALRKKHADSVAELGEQIDNLQRVKQKLEKEKSEMKMEIDDLASNMETVSKAKGNLEKMCRTLEDQLSELKSKEEEQQRLINDLTAQRGRLQTESGEFSRQLDEKEALVSQLSRGKQAYTQQIEELKRQLEEEIKAKNALAHALQSSRHDCDLLREQYEEEQESKAELQRALSKANTEVAQWRTKYETDAIQRTEELEEAKKKLAQRLQAAEEHVEAVNAKCASLEKTKQRLQNEVEDLMLDVERTNAACAALDKKQRNFDKILAEWKQKYEETHAELEASQKEARSLGTELFKMKNAYEESLDQLETLKRENKNLQQEISDLTEQIAEGGKRIHELEKIKKQVEQEKSEIQAALEEAEASLEHEEGKILRIQLELNQVKSEVDRKIAEKDEEIDQLKRNHVRVVESMQSMLDAEIRSRNDAIRLKKKMEGDLNEMEIQLNHANRMAAEALRNYRNTQGILKDTQIHLDDALRGQEDLKEQLAMVERRANLLQAEIEELRATLEQTERSRKVAEQELLDASERVQLLHTQNTSLINTKKKLETDISQMQGEMEDILQEARNAEEKAKKAITDAAMMAEELKKEQDTSAHLERMKKNMEQTVKDLQHRLDEAEQLALKGGKKQIQKLEARVRELEGEVESEQKRNAEAVKGLRKHERRVKELTYQTEEDRKNILRLQDLVDKLQAKVKSYKRQAEEAEEQSNTNLSKFRKLQHELEEAEERADIAESQVNKLRVKSREVHTKVISEE

SEQ ID NO: 48 - protein, 1937 aa, Sus scrofa
MSSDQEMAIFGEAAPYLRKSEKERIEAQNKPFDAKTSVFVAEPKESFVKGTVQSREGGKVTVKTEAGATLTVKEDQVFPMNPPKFDKIEDMAMMTHLHEPAVLYNLKERYAAWMIYTYSGLFCVTVNPYKWLPVYNAEVVTAYRGKKRQEAPPHIFSISDNAYQFMLTDRENQSILITGESGAGKTVNTKRVIQYFATIAVTGEKKKEEPTPGKMQGTLEDQIISANPLLEAFGNAKTVRNDNSSRFGKFIRIHFGTTGKLASADIETYLLEKSRVTFQLKAERSYHIFYQIMSNKKPELIEMLLITTNPYDYAFVSQGEITVPSIDDQEELMATDSAIEILGFTSDERVSIYKLTGAVMHYGNLKFKQKQREEQAEPDGTEVADKAAYLQGLNSADLLKALCYPRVKVGNEFVTKGQTVQQVYNAVGALAKAVYDKMFLWMVTRINQQLDTKQPRQYFIGVLDIAGFEIFDFNSLEQLCINFTNEKLQQFFNHHMFVLEQEEYKKEGIEWEFIDFGMDLAACIELIEKPMGIFSILEEECMFPKATDTSFKNKLYEQHLGKSNNFQKPKPAKGKAEAHFSLIHYAGTVDYNITGWLDKNKDPLNETVVGLYQKSSVKTLAFLFAERQSSEEGGTKKGGKKKGSSFQTVSALFRENLNKLMTNLRSTHPHFVRCIIPNETKTPGAMEHELVLHQLRCNGVLEGIRICRKGFPSRILYADFKQRYKVLNASAIPEGQFIDSKKASEKLLGSIDIDHTQYKFGHTKVFFKAGLLGTLEEMRDEKLAQLITRTQAMCRGFLMRVEFRKMMERRESIFCIQYNIRAFMNVKHWPWMKLYFKIKPLLKSAETEKEMANMKEEFEKTKEDLAKSEAKRKELEEKMVALMQEKNDLQLQVQAEADGLADAEERCDQLIKTKIQLEAKIKEVTERAEDEEEINAELTAKKRKLEDECSELKKDIDDLELTLAKVEKEKHATENKVKNLTEEMAGLDENIAKLTKEKKALQEAHQQTLDDLQAEEDKVNTLTKAKTKLEQQVDDLEGSLEQEKKLRMDLERAKRKLEGDLKLAQESTMDIENDKQQLDEKLKKKEFEMSNLQSKIEDEQALAMQLQKKIKELQARTEELEEEIEAERASRAKAEKQRSDLSRELEEISERLEEAGGATSAQIEMNKKREAEFQKMRRDLEEATLQHEATAAALRKKHADSVAELGEQIDNLQRVKQKLEKEKSELKMEIDDLASNMETVSKAKGNLEKMCRTLEDQLSEVKTKEEEHQRLINELSAQKARLQTESGEFSRQLDEKEALVSQLSRGKQAFTQQIEELKRQLEEETKAKSALAHAVQSSRHDCDLLREQYEEEQEAKAELQRAMSKANSEVAQWRTKYETDAIQRTEELEEAKKKLAQRLQDAEEHVEAVNAKCASLEKTKQRLQNEVEDLMLDVERSNAACAALDKKQRNFDKILAEWKHKYEETQAELEASQKESRSLSTELFKVKNAYEESLDQLETLKRENKNLQQEISDLTEQIAEGGKHIHELEKVKKQIEQEKSELQAALEEAEASLEHEEGKILRIQLELNQVKSEIDRKIAEKDEEIDQMKRNHIRVVESMQSTLDAEIRSRNDALRIKKKMEGDLNEMEIQLNHANRQATEAIRNLRNTQGVLKDTQLHLDDAIRGQDDLKEQLAMVERRANLMQAEIEELRASLEQTERSRRVAEQELLDASERVQLLHTQNTSLINTKKKLETDISQIQGEMEDIVQEARNAEEKAKKAITDAAMMAEELKKEQDTSAHLERMKKNMEQTVKDLQHRLDEAEQLALKGGKKQIQKLEARVRELENEVENEQKRNVEAVKGLRKHERRVKELTYQTEEDRKNVLRLQDLVDKLQSKVKAYKRQAEEAEEQSNVNLSKFRKLQHELEEAEERADIAESQVNKLRVKSREVHTKVISEE

SEQ ID NO: 49 - protein, 1941 aa, Gallus gallus
MATDADMAIFGEAAPYLRKSEKERIEAQNKPFDAKSSVFVVHAKESYVKSTIQSKESGHKVTVKTEGGETLTVKEDQIFSMNPPKYDKIEDMAMMTHLHEPAVLYNLKERYAAWMIYTYSGLFCVTVNPYKWLPVYNPEVVLAYRGKKRQEAPPHIFSISDNAYQFMLTDRENQSILITGESGAGKTVNTKRVIQYFATIAASGDKKKEEQPAGKMQGTLEDQIISANPLLEAFGNAKTVRNDNSSRFGKFIRIHFGATGKLASADIETYLLEKSRVTFQLKAERSYHIFYQIMSNKKPELIEMLLITTNPYDYQYVSQGEITVPSINDQEELMATDSAIDILGFTPDEKTAIYKLTGAVMHYGNLKFKQKQREEQAEPGGTEVADKAAYLMGLNSADLLKALCYPRVKVGNEYVTKGQTVQQVYNSVGALAKSVFEKMFLWMVVRINQQLDTKQPRQYFIGVLDIAGFEIFDFNSLEQLCINFTNEKLQQFFNHHMFVLEQEEYKKEGIEWEFIDFGMDLAACIELIEKPMGIFSILEEECMFPKATDTSFKNKLYDQHLGKSNNFQKPKPGKGKAEAHFSLVHYAGTVDYNITGWLEKNKDPLNETVVGLYQKSSLKTLALLFASVGGAEAESGAGGKKGGKKKGSSFQTVSALFRENLNKLMSNLRSTHPHFVRCLIPNETKTPGAMEHELVLHQLRCNGVLEGIRICRKGFPIRILYADFKQRYKVLNASAIPEGQFIDSKKASEKLLGSIDVDHTQYKFGHTKVFFKAGLLGLLEEMRDEKLAQLITRTQARCRGFLMRVEFKKMMERRESIFCIQYNVRAFMNVKHWPWMKLFFKIKPLLKSAESEKEMANMKEEFEKTKEELAKSEAKRKELEEKMVSLLQEKNDLQLQVQAEADGLADAEERCDQLIKTKIQLEAKIKELTERAEDEEEMNAELTAKKRKLEDECSELKKDIDDLELTLAKVEKEKHATENKVKNLTEEMAALDETIAKLTKEKKALQEAHQQTLDDLQAEEDKVNTLTKAKTKLEQQVDDLEGSLEQEKKLRMDLERAKRKLEGDLKMTQESTMDLENDKQQLDEKLKKKDFEISQIQSKIEDEQALGMQLQKKIKELQARIEELEEEIEAERTSRAKAEKHRADLSRELEEISERLEEAGGATAAQIDMNKKREAEFQKMRRDLEEATLQHEATAAALRKKHADSTADVGEQIDNLQRVKQKLEKEKSELKMEIDDLASNMESVSKAKANLEKMCRSLEDQLSEIKTKEEEQQRTINDISAQKARLQTESGEYSRQVEEKDALISQLSRGKQAFTQQIEELKRHLEEEIKAKKCPAHALQSARHDCDLLREQYEEEQEAKGELQRALSKANSEVAQWRTKYETDAIQRTEELEEAKKKLAQRLQDAEEHVEAVNSKCASLEKTKQRLQNEVEDLMIDVERSNAACAALDKKQKNFDKILSEWKQKYEETQAELEASQKESRSLSTELFKMKNAYEESLDHLETLKRENKNLQQEISDLTEQIAEGGKAIHELEKVKKQIEQEKSELQTALEEAEASLEHEEGKILRVQLELNQVKSDIDRKIAEKDEEIDQLKRNHLRVVDSMQSTLDAEIRSRNEALRLKKKMEGDLNEIEIQLSHANRQAAEAQKNLRNTQGVLKDTQIHLDDALRSQEDLKEQVAMVERRANLLQAEIEELRAALEQTERSRKVAEQELLDASERVQLLHTQNTSLINTKKKLESDISQIQSEMEDTIQEARNAEEKAKKAITDAAMMAEELKKEQDTSAHLERMKKNLDQTVKDLQHRLDEAEQLALKGGKKQIQKLEARVRELEGEVDAEQKRSAEAVKGVRKYERRVKELTYQSEEDRKNVLRLQDLVDKLQMKVKSYKRQAEEAEELSNVNLSKFRKIQHELEEAEERADIAESQVNKLRAKSREIGKKAESEE

SEQ ID NO: 50 - protein, 1939 aa, Sus scrofa
MSSDQEMAIFGEAAPYLRKSEKERIEAQNKPFDAKTSVFVAEPKESFVKGTVQSREGGKVTVKTEAGATLTVKEDQVFPMNPPKFDKIEDMAMMTHLHEPAVLYNLKERYAAWMIYTYSGLFCVTVNPYKWLPVYNAEVVTAYRGKKRQEAPPHIFSISDNAYQFMLTDRENQSILITGESGAGKTVNTKRVIQYFATIAVTGEKKKEEPTSGKMQGTLEDQIISANPLLEAFGNAKTVRNDNSSRFGKFIRIHFGTTGKLASADIETYLLEKSRVTFQLKAERSYHIFYQIMSNKKPELIEMLLITTNPYDYAFVSQGEITVPSIDDQEELMATDSAIEILGFTSDERVSIYKLTGAVMHYGNLKFKQKQREEQAEPDGTEVADKAAYLQGLNSADLLKALCYPRVKVGNEFVTKGQTVQQVYNAVGALAKAVYDKMFLWMVTRINQQLDTKQPRQYFIGVLDIAGFEIFDFNSLEQLCINFTNEKLQQFFNHHMFVLEQEEYKKEGIEWEFIDFGMDLAACIELIEKPMGIFSILEEECMFPKATDTSFKNKLYEQHLGKSNNFQKPKPAKGKVEAHFSLIHYAGTVDYNITGWLDKNKDPLNETVVGLYQKSSVKTLAFLFTGAAGADAEAGGGKKGGKKKGSSFQTVSALFRENLNKLMTNLRSTHPHFVRCIIPNETKTPGAMEHELVLHQLRCNGVLEGIRICRKGFPSRILYADFKQRYKVLNASAIPEGQFIDSKKASEKLLGSIDIDHTQYKFGHTKVFFKAGLLGLLEEMRDEKLAQLITRTQARCRGFLARVEYQKMVERRESIFCIQYNIRAFMNVKHWPWMKLYFKIKPLLKSAETEKEMANMKEEFEKTKESLAKAEAKRKELEEKMVALMQEKNDLQLQVQAEADSLADAEERCDQLIKTKIQLEAKIKEVTERAEDEEEINAELTAKKRKLEDECSELKKDIDDLELTLAKVEKEKHATENKVKNLTEEMAGLDETIAKLTKEKKALQEAHQQTLDDLQAEEDKVNTLTKAKTKLEQQVDDLEGSLEQEKKLRMDLERAKRKLEGDLKLAQESTMDIENDKQQLDEKLKKKEFEMSNLQSKIEDEQALAMQLQKKIKELQARIEELEEEIEAERASRAKAEKQRSDLSRELEEISERLEEAGGATSAQIEMNKKREAEFQKMRRDLEEATLQHEATAATLRKKHADSVAELGEQIDNLQRVKQKLEKEKSEMKMEIDDLASNMETVSKAKGNLEKMCRTLEDQLSELKTKEEEQQRLINDLTAQRARLQTESGEYSRQLDEKDTLVSQLSRGKQAFTQQIEELKRQLEEEIKAKSALAHAVQSSRHDCDLLREQYEEEQEAKAELQRAMSKANSEVAQWRTKYETDAIQRTEELEEAKKKLAQRLQDAEEHVEAVNAKCASLEKTKQRLQNEVEDLMIDVERSNAACAALDKKQRNFDKILAEWKQKYEETHAELEASQKESRSLSTELFKVKNAYEESLDQLETLKRENKNLQQEISDLTEQIAEGGKRIHELEKIKKQVEQEKSEIQAALEEAEASLEHEEGKILRIQLELNQVKSEVDRKIAEKDEEIDQLKRNHVRVVESMQSMLDAEIRSRNDAIRLKKKMEGDLNEMEIQLNHANRMAAEALRNYRNTQGILKDTQIHLDDALRSQEDLKEQLAMVERRANLLQAEIEELRATLEQTERSRKVAEQELLDASERVQLLHTQNTSLINTKKKLETDISQIQGEMEDIIQEARNAEEKAKKAITDAAMMAEELKKEQDTSAHLERMKKNLEQTVKDLQHRLDEAEQLALKGGKKQIQKLEARVRELEGEVESEQKRNVETVKGLRKHERRVKELTYQTEEDRKNILRLQDLVDKLQAKVKSYKRQAEEAEEQSNVNLSKFRKLQHELEEAEERADIAESQVNKLRVKSREVHTKIISEE

SEQ ID NO: 51 - protein, 1941 aa, Gallus gallus
MASSDAEMAAFGEAAPYHRKSEKERIEAQNKPFDAKSSVFVAHPKESFVKGTIQSRETGKVTVKTEGGETLTVKEDQVFSMNPPKYDKIEDMAMMTHLHEPAVLYNLKERYAAWMIYTYSGLFCVTVNPYKWLPVYNPEVVLAYRGKKRQEAPPHIFSISDNAYQFMLTDRENQSILITGESGAGKTVNTKRVIQYFATIAASGEKKKEEQSGKMQGTLEDQIISANPLLEAFGNAETVRNDNSSRFGKFIRIHFGATGKLASADIETYLLEKSRVTFQLKAERSYHIFYQIMSNKKPELIDMLLITTNPYDYHFVSQGEITVPSIDDQEELMATDSAIDILGFTADEKTAISKLTGAVMHYGNLKFKQKQREEQAEPDGTEVADKAAYLMGLNSADLLKALCYPRVKVGNEYVTKGQTVQQVHNAVGALAKAVYEKMFLWMVVRINQQLDTKQPRQYFIGVLDIAGFEIFDFNSFEQLCINFTNEKLQQFFNHHMFVLEQEEYKKEGIEWTFIDFGMDLAACIELIEKPMGIFSILEEECMFPKATDTSFKNKLYDQHLGKSSNFQKPKPAKGKAEAHFSLVHYAGTVDYNITGWLEKNKDPLNETVIGLYQKSSVKTLALLFATYGGADAEAGGGGKKGGKKKGSSFQTVSALFRENLNKLMTNLRSTHPHFVRCIIPNETKTPGAMEHELVLHQLRCNGVLEGIRICRKGFPSRVLYADFKQRYKVLNASAIPEGQFIDSKKASEKLLSSIDVDHTQYKFGHTKVFFKAGLLGLLEEMRDEKLAQLITRTQARSRGFLMRVEYQRMVERRESIFCIQYNVRSFMNVKHWPWMKLFFKIKPLLKSAESEKEMANMKEEFEKTKEELAKSEAKRKELEEKMVKLVQEKNDLQLQVQAEADSLADAEERCDQLIKTKIQLEAKIKEVTERAEDEEEINAELTAKKRKLEDECSELKKDMDDLELTLAKVEKEKHATENKVKNLTEEMAALDETIVKLTKEKKALQEAHQQTLDDLQAEEDKVNTLTKAKTKLEQQVDDLEGSLEQEKKLRMDLERAKRKLEGDLKLAHDSIMDLENDKQQLDEKLKKKDFEISQIQSKIEDEQALGMQLQKKIKELQARIEELEEEIEAERTSRAKAEKHRADLSRELEEISERLEEAGGATAAQIDMNKKREAEFQKMRRDLEEATLQHEATAAALRKKHADSTAELGEQIDNLQRVKQKLEKEKSELKMEIDDLASNMESVSKAKANLEKMCRTLEDQLSEIKTKEEEHQRMINDLNTQRARLQTEAGEYSRQVEEKDALISQLSRGKQAFTQQIEELKRHLEEEIKAKNALAHALQSARHDCDLLREQYEEEQEAKGELQRALSKANSEVAQWRTKYETDAIQRTEELEEAKKKLAQRLQDAEEHVEAVNAKCASLEKTKQRLQNEVEDLMIDVERANAACAALDKKQKNFDKILAEWKQKYEETQAELEASQKESRSLSTELFKMKNAYEESLDHLQTLKRENKNLQQEISDLTEQIAEGGKAIHELEKVKKQIEQEKSEIQAALEEAEASLEHEEGKILRLQLELNQVKSEIDRKIAEKDEEIDQLKRNHLRIVESLQSSLDAEIRSRNEALRLKKKMEGDLNEMEIQLSHANRVAAEAQKNLRNTQAVLKDTQIHLDDALRTQEVLKEQVAMVERRANLLQAEIEELRAALEQTERSRKVAEQELMDASERVQLLHTQNTSLINTKKKLETDIAQIQSEMEDTIQEARNTEEKAKKAITDAAMMAEELKKEQDTSAHLERMKKNLDQTVKDLQHRLDEAEQLALKGGKKQIQKLEARVRELEGEVDAEQKRSAEAVKGVRKYERRVKELTYQSEEDLKNILRLQDLVDKLQMKVKSYKRQAEEAEELSNVNLSKFRKIQHELEEAEERADIAESQVNKLRVKSREFHSKKIEEEE

SEQ ID NO: 52 - protein, 1939 aa, Gallus gallus; identical to SEQ ID NO: 30

SEQ ID NO: 53 - protein, 1132 aa, Gallus gallus
MPEPSKAAPKKEAKKKEEKKEEKKEAPPPQEHKDEAPDDVHPPETPDPEGLFLSKPQNVMVESGRDVTVSARVAGAALPCAPAVKWFKGKWAELGDKSARCRLRHSVDDDKVHTFELTITKVAMGDRGDYRCEVTAKEQKDSCSFSIDVEAPRSSEGNVLQAFKRTGEGKDDTAGELDFSGLLKKREVQVEEKKKKKDEDDQFPPEIWELLKGVTKKSEYERIAFQYGITDLRGMLKRLKKVHVEPKKSEAFIRKLDPAYQVDKGNKIKLVVELSDPDLPLKWYKNGQLLKPSTKYVFENVGLKRILTIHKCSLADDAAYECRVNDEKCFTEVFVKEPPVTVVRGLEDQQVVVGDRVVLEAEVSEEGAQVMWLKDGVDVTRDDAFKYRFKKDGKKHFLIINEAELSDSAHYKIMTNGGESEAELSVEEKQLEVLQDMADLTVKASEQAVFKCEVSDEKVTGRWFRNGVEVKPSKRIHISHNGRFHKLVIDDVRPEDEGDYTFIPDGYALSLSAKLNFLEIKVEYVPKQEPPKIHLDCSGKAAENTIVVVAGNKVRLDVPISGEPAPTVTWKRGDQLFTATEGRVHIDSQADLSSFVIESAERSDEGRYCITVTNPVGEDSATLHVRVVDVPDPPQSVRVTSVGEDWAVLSWEAPPFDGGMPITGYLMERKKKGSMRWMKLNFEVFPDTTYESTKMIEGVFYEMRVFAVNAIGVSQPSLNTQPFMPIAPTSEPTHVVLEDVTDTTATIKWRPPERIGAGGVDGYLVEWCREGSNEWVAANTELVERCGLTARGLPTGERLLFRVISVNMAGKSPPATMAQPVTIREIVERPKIRLPRHLRQTYIRRVGEQVNLVIPFQGKPRPQVTWSREGGALPAEVQTRTSDVDSVFFIRSAARPLSGNYEMRVRIDNMEDCATLRLRVVERPGPPQAVRVMEVWGSNALLQWEPPKDDGNAEISGYTVQKADTRTMEWFTVLEHSRPTRCTVSELVMGNEYRFRVYSENVCGTSQEPATSHNTARIAKEGLTLKMVPYKERDLRAAPQFLTPLVDRSVVAGYTVTLNCAVRGHPKPKVTWLKNSVEIGADPKFLSRHGLGVLSLLIRRPGPFDGGTYGCRAVNEMGEATTECRLDVRVPQ

SEQ ID NO: 54 - protein, 1135 aa, Bos taurus
MPEAKPAAKKAPAGKDAAAKPAPKEATPQEAPAAPPTEAPPEDQSPTAEEPTGVFLKKPDSVSVETGKDTVIVAKLNGKELPAKPAVKWFKGKWLELGSKSGARFSFKESHDAASNVYTIELHITKVVLGDRGDYRIEVKAKDFCDSCAFNIDVEAPRQDSAGQSLESFKRSGEAKSDTAGELDFSGLLKKRQVVEEEKKKKKDDDDLGIPPEIWELLKGAKKSEYERIAFQYGITDLRGMLKRLKKAKVEVKKSAAFTKKLDPAYQVDRGNKIKLVVEISDPDLPLKWFKNGQEIKPSSKYVFENVGKKRILTINKCTLADDAAYEVVVKDEKCFTELFVKVEPPVLIVTPLEDQQVFVGDRVEMAVEVSEEGAQVMWLKDGVELTREDSFKARYRLKKDGKRHILIYSEVTMEDKGHYQVMTNGGQCEAELIVEEKQLEVLQDIADLTVKASEQAVFKCEVSDEKVTGKWYKNGVEVRPSKRITISHTGRFHKLVIDDVRPEDEGDYTFVPDGYALSLSAKLKFLEIKVEYVPKQEPPKIHLDCSGQTSENAIVVVAGNKLRMDVSITGEPRPVATWMKEDEVFTGTEGRVRIEQRGDISSFVIESAERGDEGRYTIKVTNPVGEDVASILLKVVDVPDPPEAVRVTSVGEDWAVLVWEPPKYDGGRPVTGYLLERKKKGSQRWMKLNFEVFTETTYESTNMIEGILYEMRVFAAPLIQQLKTLTPQPHAPFSPTSEPQHLTVEDVTDTTTTLKWRPPDKIGAGGIDGYLIEYCVEGSDEWIPANTEPVERCGFTVKNLPTGAKITFRVVGVNIAGRSQPATLAQPVTIREIVEQPKIRLPRHLRQTYVRKVGEHLNLVIPFQVRRAKGGAPIDTSHVHVRTSDFDTVFFVRQAARSDSGEYELTVQIENMKDTATVCIRVVEKAGPPQNVMVKEVWGTNALVEWQPPKDDGNSEITGYFVQKADKKTMEWFTVYERNRHTSCTVSDLIMGNEYYFRVYSENVCGLSDLPGVSKNTARIVKTGMTLKLPEYKEHDFRTPPKFLTPLPDRVVVAGYAAALNCAVRGHPKPKVVWMKNKMEIREDPKFLMTNQQGVLTLNIRRPSPFDSGTYSCRAVNELGEALAECKLEVRAPR

SEQ ID NO: 55 - protein, 537 aa, Gallus gallus
MTGKTAPAAAKKAPAAKKAPAPASKKAPEPAPKEKPAPTPKEGHAPTPKEEHAPPPKEEHAPPPKEEHAPAPAAETPPAPEHPPDAEQPAAPAAEHAPTPTHEAAPAHEEGPPPAAPAEAPAPEPEPEKPKEEPPSVPLSLAVEEVTENSVTLTWKAPEHTGKSSLDGYVVEICKDGSTDWTAVNKEPFLSTRYKIHDLASGEKVHVRVKAISASGTSDPATLEQPVLIREITDLPRIRLPRQLRQVYVRHVGEAVNLLIPFQGKPQPQVTWTKDNQPLDTSRVNIRNTDKDTIFFIRTAQRSDSGKYQLSVRINGAEDKAILDIRVIERPGPPQNLKLVDVWGFNVALEWSPPADNGNSEIKGYTVQKSDKKSGKWFTVLERCTRTSCTISDLIIGNTYSFRVFSENACGMSETAAVAAGVAHIKKTVYQPQKIPERDMMEPPKFTQPLTDRATTRGYSTHLFCSVRGFPQPKIIWMKNKMEIREDPKYIAMIEQGVCSLEIRKPSPFDAGVYTCKAVNPLGEASVDCKLDVKMPK

SEQ ID NO: 56 - protein, 491 aa, Bos taurus
MTEKATSEAPACGLEETTSESAHVPLTEPSGDTAAPQAPGGEQAPRGQQASDPQESARQPPDPAASAAPAGPAATDPALPREDVPSAPLLLAVEDVSDSSVTVSWEPPERLGRLGLQGYVLELRREGALDWVPVNARPMMVTQQTLRNLAVGDKFFVRVAAVSSAGAGPPAVLERLIHIQETIEAPKIRVPRHLRQTYIRQVGESINLQIPFQGNPKPQALWTHNGHALDSQRVSVRTGDQDSILFIRSAQRSDSGCYELTVQLKDLEAKAAINILVIEKPGPPRSIRLLDVWNCNATLEWTPPQDTGNTELLGYTVQKADKKTGQWFTVLERCHPTSCTVSDLIVGNSYSFRVFSENLCGLSASAAVTKELAHIVKTDIVAKPKSFVERDFSEAPSFTQPLADHTSTPGYSTQLSCSVRASPKPKIIWMKNKMDIQGDPKYRALSEQGVCTLEIRKPSPFDSGVYTCKAINVLGEASVDCRLEVKASATH

SEQ ID NO: 57 - protein, 8074 aa, Gallus gallus
MTTKAPTFTQPLQSVVALEGSAATFEAHISGFPVPEVSWYRDGQVLSAATLPGVQISFSDGRAKLVIPSVTEANSGRYTIQATNGSGQATSTAELLVTAGTAPPNFSQRLQSMTARQGSQVRLDVRVTGIPTPVVKFYRDGVEIQSSPDFQILQEGDLYSLIIAEAYPEDSGTYSVNATNNVGRATSTAELLIQGEEEAVPAKKTKTIVSTAQISQTRQARIEKKIETHFDARSLTSVEMVIEGAAAQQLPHKAPPRMPPRPTSKSPTPPVITAKAQMARQQSPSPVRQSPSPVRHVRAPTPSPVRSVSPAGRISTSPIRPVKSPSPIRKAQVVTPGAEVLPPWRQEGYSATAEAQMKETRVSTSATEIRTEERWEGRYGLQEQVTISGAAAGEVAAGAKEVRKEPEKTPVPTVIIATDKAKEQERISTAREEISARHEQVHVSHEQIEAGKRAEAVATVVAAVDQARVRSPWETEQVDETYVKKKTLEYGYKEHAVKDHEAQAEHHVATKEVKTVYVPPEKHIPAAEKKEVHVSTEIKRETEAKIEKTIHIEHPRPRTASPHFTVSKIAVPKPDHTYEVSIAGSAMATLEKELSATSAAQKITKPVKPPQLKPHEVKIKPESAPPQFPFTEAAETYKAHYDVETKKEVDVSIKGEAVREDHLLLRKESEAKVTETARVPVPAEIPVTPPTLVWGLKNKTVTEGESVTLECHISGHPQPTVTWYREDYKIESSMDFQITFKAGLARLVIREAFAEDSGRFTCTATNKAGSVSTSCHLHVKVSEETETRETISEKVVTEEKSYVETKDVVMEDVSAAAEEVSGEPVPPFFIRKPVVHKLIEGGSIIFECQVGGNPKPHVLWKKGGVPLTTGYRYKVSYKRETGECKLEISMTFADDAGEYTIVIRNKFGEASATVSLLEEADYEAYIKSQQEMMYQTQVTAYVQEPKVAEVAPPISYGDFDKEYEKEQALIRKKMAKDTVMVRTFVEDEEFHISSFEERLIKEIELRIIKTTLDELLEEDGEEMMIDISESEAIGAGFDLRLKNYRTFEGTGVTFHCKTTGYPLPKIAWYKDGKRIRHGERYHMEVLQDGSASLRLPVVLPEDEGIYTVFASNMKGNAICSAKLYVEPVAPTATPGYMPGPEVMRRYRSISPRSPSRSPARSSPSCSPARRLDETDEGQLERLYKPVFVLKPTSVKCSQGQTARFDLKVVGRPMPETYWFHNGQQVVNDYTHKIVIKEDGTQSLIIVPAMPEDSGEWAVIAQNRAGKASVSVTLSVEAKEDLVRPRFVERLRNVSVKEGSRLHMAVKATGNPNPDIVWLKNSDIIVPHKYPRIRIEGTKGAAALNIESTARQDAAWYTATAINKAGRDTTRCKVNVEVEHAEPEPERRLIIPKGTYKAKEIAAPELEPLHLRYGQEQWEEGDLYDKEKQQKPFFKKKLTSLRLKQFGPAHFECRLTPIGDPTMVVEWLHDGKPLEAANRLRMINEFGYCSLDYGVAYSRDSGVITCRATNKYGTDHTSATLIVKDEKSLVEESQLPEGRRGMQRIEELERMAHEGALPAVAVDQKEKQKPELVLVPEPARVLEGETARFRCRVTGYPLPKVNWYLNSQLIRKSKRFRLRYDGIHYLDIVDCKSYDTGEVKVTAENPEGFIEHKVKLEIQQREDFRSVLRRAPEPRHEPVVTEPGKLLFEVQKIDKPAEATTKEVVKLKRAERITHEKLSEESEELRSKFKRRTEEGYYEAITAVELKSRKKDESYEEMLKKTKEELLHWTKEIPEEEKKALPPEGKITIPTFKPEKVELSPSMEAPKIFERIQSQTVAQGTDAHFRVRVVGKPDPECQWFRNGVQIERTDRIYWYWPEDNVCELVIRDVTADDSASIMVKAVNIAGETSSHAFLLVQAKQLISFIQNLQDVVAKERDSMATFECETSEPFIKVKWFKNGIEIHSGEKYRMHSDRKAHFLSVLAVEMSDADDYSCALVEDESVKTTAKLIVEGAVVEFIKELEDVEVPESFTGELECEVSPEDIEGKWYHGDVELSSNHKYVLASRRGRRILTIKDVNKDDQGEYSFVVDGKRTHCKLKMKPRPMTILQGLTDQKVCEGDIVQLEVKVSVENVEGVWMKDGHEIQSSDRIHIVLDKQSHMLLIEDATQEDSGTYSFSIPGLELSTTGQVTVYSVEIIVPLKDVHVVEGTKAILECKVSAPDVTSSKWYLNDHQIKPDERVQAVCKGTKQRLVITRTHASDEGHYKLMVGKVETSCNVTVEEIEIIRGLHDITCTETQNVSFEVELSHSGIDVIWHFKGQEIKAGPKYKIEARGKIYKLTVVKMMKDDEGEYVFYAGGKKTSGKLIVAGGAISKPLADLTVAESQRAVFECEVANPESEGQWLKNGKPLPMTDQYRAETDGVKRRLNIPAAKMDDMGEYSYEIASSKTSAKLHVEAVKIKKTLKNLTVTETQEAVFSVELSHPDVKGALWIKNGVELESNDKYEISVKGTVHTLKIKHCVVTDESVYSFKLGKIGANARLHVETVKIIKKPKDVTALENAVVSFELSVSHDTVPVRWFHKNVELKQSDKYKMISQRKVHKLMLHNISPADAGEYTAFVGQLECKAKLFVETIHITKTMKSIEIPETKTASFQCEVSHFNVPSVWLKNGVEIEMSEKFKIVVQGKLHQLNIMNTSSEDSAEYTFVCGNDRVSATLTVKPILITSMLEDINAEEKDTITFEVTVNYEGISYKWLKNGVEIKSTDKCQIRTKKLTHSLSIRNVHFGDAAEYSFVAGKAASSATLYVEARHIEFRKHIKDIKVVEKKRAIFECEISEPDVQVQWMKDGQELQIGDRMKIQREKYVHRLIIPSTKMSDAGQYTVVAGGNTSSANLIVEGRDVRIRSIRKEIQVIERQRAEIEFEVNEDDIEPQWYKDGIEINFHYEERYSYVVERRIHRMSIFETTYSDAGEYTFVAGRNRSSVVLYVNAPEPPQIIQELQPTTVESGKPARFCAIISGKPQPKVSWYKDDQQLSPGFKCKFLHDAQEYTLLLIETFPEDSAVYTCEAKNDYGVATTSASLSVEIPEVVSPELEVPVYPPAVIVPLRDAVTSEGQSARFQCRVTGTDLKVSWYSKDREIKPSRFFRMTQFEDTYQLEIAEAYPEDEGTYTFVASNSVGQVTSTAILKLEAPEKIMYEKLEEEIEMEVKVAPILRRRLEPLEVAVNHVAKFTCEVETTPNVKFQWYKAGREIYDGDKYSIRSSNYLSTLEIPRPQVVDCGEYSCKASNQHGSVSSTAFLTVTEPPRFIKKLDSSRLVKQHDSTRYECKVGGSPEIKVTWYKGETEIHPSEKYSMSFVDSVAVLEMHNLSVEDSGDYSCEAQNPAGSASTSTSLKVKAPPAFTKKPHPVQTLKGSDVHLECELQGTPPFQISWYKDKREIRSSKKYKVMSENYLASIHILNVDTADVGEYHCKAVNDVGSDSCIGSVTLRAPPTFVKKLSDVTVVVGETIELQAAVEGAQPISVLWLKDKGEIIRESENLWISYSENVASLKIGNAEPTNAGKYICQIKNDAGFQECFAKLTVLEPAVIVEKPGPVKVTAGDSCTLECTVDGTPELTARWFKDGNELSTDHKYKISFFNKVSGLKILNAGLEDSGEYTFEVKNSVGKSSCTASLQVSDRIMPPSFTRKLKETYGQLGSSAVLECKVYGSPPILVSWFHDGQEITSGDKYQATLTDNTCSLKVNGLQESDMGTYSCTATNVAGSDECSAFLSVREPPSFVKKPEPFNVLSGENITFTSIVKGSPPLEVKWFRGSIELAPGHKCNITLQDSVAELELFDVQPLQSGDYTCQVSNEAGKISCTTHLFVKEPAKFVMKVNDLSVEKGKNLILECTYTGTPPISVTWKKNGVILKHSEKCSITTTETSAILEIPNSKLEDQGQYSCHIENDSGQDNCHGAITILEPPYFVTPLEPVQVTVGDSASLQCQVAGTPEMIVSWYKGDTKLRGTATVKMHFKNQVATLVFSQVDSDDSGEYICKVENTVGEATSSSLLTVQERKLPPSFTRKLRDVHETVGLPVTFDCGIAGSEPIEVSWFKDNVRVKEDYNVHTSFIDNVAILQILKTDKSLMGQYTCTASNAIGTASSSGKLVLTEGKTPPFFDTPITPVDGIIGESADFECHISGTQPIRVTWAKDNQEIRTGGNYQISYVENTAHLTILRVDRGDSGKYTCYASNEVGKDSCTAQLNVKERKTPPTFTRKLSEAVEETEGNELKLEGRVAGSQPLTVSWYKNNQEVHSSPHCEISFKNNTLLLHIKSVGQSDAGLYTCKVSNEAGSVLCTSSVVIREPKKPPVFDQPLQPAATEEGDTLQLSCHVRGSEPIRIQWLKAGREIRASERCSFSFANGVALLELAAVTKSDSGEYVCKASNVAGTDTCRSKVTVKEKAALVSAAKKADIEGKLYFVSEPQSIKVMEKTVATFIAKVGGDPIPNVKWMKGKWRQLNQGGRIIIQQRGDEAKLEIKDTTKTDSGLYKCVAFNQHGEIERSVNLQVEERKQEVVEEDVRGKLKRIPTKKKEDEEQTIDILELLKNVDPKEYEKYARMYGITDFRGLLQAFELLKQTREEESHRLEIELTEKAQKEDQEFEELVAFIQQRLTQTEPVTLIRDIENQTVLTDEDAIFECEIKINYPEIKLSWYKGTQKLDSSDKYKIKIEGDRHILKIKNCQLEDQGNYRIVCGPHIASARLTVIEPAVERHLHDTTFKEGNTCTLSCQFSIPNAKSQWYRNGRPIKIGGRYSTQVSDKVHKLIIKDVRTEDQGQYTCKLDNLETTADLTIEAEPIQFTKSIQNIVVSEHQSATFECEVSFDDAVVTWYKGPTELTESPKYSFRSEGRCHYMTIHNVTAEDEGVYSVIARLEPRGEARSTAELYLVTKEIKLELKPPDVPDAKVAVPPQKPAEAAPIPILLPLIPTPEEKKPAEKKVPVKKVSKKVVKKGPKEIPPPEVPEILPEKPKEVKITSMARREEIHEEKMEIYEKPKKVYEEWEEDYGEDHDYYFKEEGYDEGEEEWEETYDKREVAYEEEQIIHEEVVEVPKKPVPERKPPAITAEKKEKKEVTVHKVPDVPKKIPEEKVPITVPKKPEPTPAKEPEVHKIIEEKIKVSEPKKPEVPPAKVPEVPKKVVKEEVSVEVPKKPEPPPAKVPEVPKKVVPEEKVHVEVPKKAEPPPPKVLRKKPEEEEPKPEKEPKPEVKPVPTPVEKIKKPEVPEVPKKKTEIPVIKKEEKHVPEPPKEPKPAAISVPGPEPKPAVALKSPKPAAEPAPAITTAPVTTPVVGKKAEAKPTKEETPKGISPVKAKKTPSPADAERRKLRPGSGGEKPPEEPPFTYQLKAVPLKFVKEMKDIVLKEAESVGSSAIFEVLISPSTAITSWMKDGSNIRESPKHKFIADGKDRKLHIIDVQLSDAGEYTCVLRLGNKEKTSTAKLIVEELPVRFVKTLEEEVTVVKGQPLYLTCELNKERSVVWRRDGKIIKDKPGKFALGIIGLSHSLTITDSDDSDAGTYTVTVEDSELSCSSCVKVVEVIRDWLVKPIRDQHVKPKGTATFTCDIVKDTPNIKWFKGDEEIPAEPTDKTEILKEGNKIFLKIKNAGPADIGEYSVEVEGRRYPAKLTLGEREVELLKPLEDVTVYEKETANFDTEISEEDIPGEWKLKGEILRPSPTCEIKAEGGKRFLTLHKVKLEQAGEVLYQALNAVTTAILTVKEIELDFAVPLKDVTVPEKRQARFECVLTREANVIWSKGTDILKIGEKFDIIADGKKHILVINDSQFDDEGEYTAEVEGKKSTARLFVEGVRLKFITPLQDQTVKEGETAYFQFELSHEGMLVKWYKNDKRLHTSRTVFITSEGKVHKLEMREVTLDDISEIKAVVKDMNTQANLKVLEADPYFTVKLQDYSALEKDDITLQCELSKDVPVKWYKDGEELVASSRISIKTDGLRRILTIKKATEGDKGVYECSCGTDKTNCNIGVEPRLIKVERPLYGVEVFVGETARFEIEISEPDVHPIWKLKGETLTPSPECEIIEDGKKHILILHQGRLDMTGEVSFQAANAKSAANLKVKELPLIFITPLSDVKVFEKDEAKFECEVSREPKTFRWLKGTQEITPDERFEIISDGTKHALIIKSVAFDDEAKYMFEAEDKRTSAKLIIEGIRLKFITPLKDVTKKERETAVFTVELSHENIPVVWFKNDQRLHTSKVVSMTDDGKFHTLTIKDLTIDDTSQIRVEAMGKSSEAKLTVLEGDPYFTGKLQDYTAVEKDEVILQCEISKADAPVKWMKDGKPITPSKNVVIKADGKKRILILKKALKKDIGQYTCDCGTDQTSANLNIEDRDIEIIRPLYSVEVIETETARFDIEISEEGVHGNWKLKGEPLTESPDCEIKEEGKKHFLTLYNVRLDQAGGVDFQAANAKSGAHLRVKPRVIGLLRPLKDVTVTAGESATFDCELSYEGIPVEWYLQGKKLEPSDKVVTRAEGRAHTLILRDVKLTDAGEVSLTAKDFRTQANLFVKEPPVEFTKPLEDQTVEEEATAILECEVSRENAKVKWFKNGEEIHKTKKYDIISEGRVRKLIIHGCTLDDAKTYTCDAKDFKTSCFLNVEPLRVEFLRPLTDLEVKEKRICSVLNVKFLAQGVKVKWFKDGIEIEKAEYDIISKGAERILVISKCLFDDEAEYACEAKTARTSGLLTVIEEEAVFTKNLHDLEVNENETVRLICEISKPNAEVTWFKGDEEVPDGGRFEYISDGRKRILVIRNAHPEDAGKYTCKLPSSSTTGKLTVHELAAEFLTRPQNLEVLEGDKAEFACSVSKEAITVQWLWGDTVLEPGDKYDIISDGKKRTLVVKDSVVGDAGKYTVMVGEAKATARLTVIEKTQDYNSLKDQEVNEGQEIIFNCEVNKEGAKEKWYKNGEAIFDSAKYIIVQKDLVYTLRIRDTQLKDQATYSISLSNHRGEHAESSAALTVLEEGLRIVEPLEDIETMEKKTVTFWCKVNRLNATLKWTKNGEEITFNKRILYKIDKYKHSLIIKDCGFKDEGEYTVTAGQDKSVAELLITEAPADFIEHLQDQTVTEFDDAVFTCQLSKEKASVKWYRNGREIKEGKKYQFEKDGNLHRLIIKDCRLDDECEYSCGVDDRKSRARLFVEEIPVEIIRPPQDVYEAPGADVIFMAELNKDGVEVKWLRNNMIIIQGDKHQMMSEGKVHRLQVCEIKPRDQGEYRFIAKDKEARAKLELAAAPRIKTGDQNLVVDVGNPLTMTVPYDAYPRAEAEWLKGEESLPTTTVDTTTDCTTFKIYEAKKSDKGRYKVVLRNKHAQAEAFINVEVIDVPGPVRNLEVTEIYDGEVGLAWQEPESDGGSKIIGYVVERRDIKRKTWIVVTDHAENCEYTVTGLQKGGVEYLFRVSARNRVGTGEPVETERPVEAKSKFEVPGPPQNVEVTDVNRFGRTLTWEAPEYDGGSPITGYVIELRNRASIKWEPTMTTGADELSAVLTDVVENEEYFFRVRAQNMVGVGKPSHPTRAVKITDPIERPSGNINLDHSDQTKTSVQLTWEPPLEDGGSPILGYIIERKEEGTDKWIRCNPKLVPACAFKVTGLKAGSSYYYRVSAENAAGVSDPAEAIGPLTADDPFVDLQWPLSAFKDGLEVIVPEPIKIRVPITGYPIPTATWSFGDQVLEEGGRVTMKTTSTFAELVITPSERPDKGIYTLTLENPVSSVSGEIDVNVLARPSAPKELKVVDVSRSTVQLSWEPPEDDGGSPVIDYIIEKREVSRKTWIKVMDHVIDQEFSVPDLIQGKEYLFRVCACNKCGPGEPAYIDEPINMSAPATVPDPPENVKWRNPTSKGIFLTWEPPKYDGGARIKGYLVEKCQRGTDKWEICGEPVIETKMEVTKLKEGEWYAYRVKALNRIGASKPSKPTDDIQAIDAKEAPEIFLDVKLLAGLTVKAGTKIELPAKITGKPEPQITWTKAEKLLRPDDRITIETTPNHSTVTITDSKRSDSGTYIIEAVNSSGRATAVVEVNVLDKPGPPAAFDVSEITNESCLLTWNPPRDDGGSKITNYVLEKRATDSEIWHKLSSTI

SEQ ID NO: 58 - protein, 539 aa, Gallus gallus
EGEEEWEETYDKREVAYEEEQIIHEEVVEVPKKPVPERKPPAITAEKKEKKEVTVHKVVKKPVDEKVEITTQRVAEEKLKQAEVTKKIPSAKPTPMIIEEKVMKKEAHKEVEEEEEREVISEELETHHVEVPDVPKKIPEEKVPITVPKKPEPTPAKEPEVHKIIEEKIKVSEPKKPEVPPAKVPEVPKKVVKEEVSVEVPKKPEPPPAKVPEVPKKVVPEEKVHVEVPKKAEPPPPKVLRKKPEEEEPKPEKEPKPEVKPVPTPVEKIKKPEVPEVPKKKTEIPVIKKEEKHVPEPPKEPKPAAISVPGPEPKPAVALKSPKPAAEPAPAITTAPVTTPVVGKKAEAKPTKEETPKGISPVKAKKTPSPADAERRKLRPGSGGEKPPEEPPFTYQLKAVPLKFVKEMKDIVLKEAESVGSSAIFEVLISPSTAITSWMKDGSNIRESPKHKFIADGKDRKLHIIDVQLSDAGEYTCVLRLGNKEKTSTAKLIVEELPVRFVKTLEEEVTVVKGQPLYLTCELNKERSVVWRRDGKIIK

SEQ ID NO: 59 - protein, 989 aa, Gallus gallus
SDKYKIKIEGDRHILKIKNCQLEDQGNYRIVCGPHIASARLTVIAEPIQFTKSIQNIVVSEHQSATFECEVSFDDAVVTWYKGPTELTESPKYSFRSEGRCHYMTIHNVTAEDEGVYSVIARLEPRGEARSTAELYLVTKEIKLELKPPDVPDAKVAVPPQKPAEAAPIPILLPLIPTPEEKKPAEKKVPVKKVSKKVVKKGPKEIPPPEVPEILPEKPKEVKITSMARREEIHEEKMEIYEKPKKVYEEWEEDYGEDHDYYFKEEGYDEGEEEWEETYDKREVAYEEEQIIHEEVVEVPKKPVPERKPPAITAEKKEKKEVTVHKVPDVPKKIPEEKVPITVPKKPEPTPAKEPEVHKIIEEKIKVSEPKKPEVPPAKVPEVPKKVVKEEVSVEVPKKPEPPPAKVPEVPKKVVPEEKVHVEVPKKAEPPPPKVLRKKPEEEEPKPEKEPKPEVKPVPTPVEKIKKPEVPEVPKKKTEIPVIKKEEKHVPEPPKEPKPAAISVPGPEPKPAVALKSPKPAAEPAPAITTAPVTTPVVGKKAEAKPTKEETPKGISPVKAKKTPSPADAERRKLRPGSGGEKPPEEPPFTYQLKAVPLKFVKEMKDIVLKEAESVGSSAIFEVLISPSTAITSWMKDGSNIRESPKHKFIADGKDRKLHIIDVQLSDAGEYTCVLRLGNKEKTSTAKLIVEELPVRFVKTLEEEVTVVKGQPLYLTCELNKERSVVWRRDGKIIKDKPGKFALGIIGLSHSLTITDSDDSDAGTYTVTVEDSELSCSSCVKVVEVIRDWLVKPIRDQHVKPKGTATFTCDIVKDTPNIKWFKGDEEIPAEPTDKTEILKEGNKIFLKIKNAGPADIGEYSVEVEGRRYPAKLTLGEREVELLKPLEDVTVYEKETANFDTEISEEDIPGEWKLKGEILRPSPTCEIKAEGGKRFLTLHKVKLEQAGEVLYQALNAVTTAILTVKEIELDFAVPLKDVTVPEKRQARFEC

SEQ ID NO: 60 - protein, 1020 aa, Gallus gallus
KSRLRRRREREITEITSEEEEEIEMVQHVHREFSPPSRLLRRRRSLSPTYIELMRPVSELIRPRSRPPEESERRSPTPERTRPRSPSPVSTERSLSRFERMARFDIFSRYESMKSALKTQKTMERKYEVLTQQPFTLDHAPRITLRMRSHRVPCGHNTRFILNVQSKPTADVKWYHNGIELQESSKIHFSNTSGVLTLEILDCHIDDSGTYRAVCTNYKGECSDYATLDVTGGDYTTYSSQRRDEEVPRSILPDLTRTEAYAVSSFKKATAAEASSSVREVKSEVSATRESLLSYEHHASSEEKITASEEKSLEERTVHKAFKSTLPATILTKPRSITVSEGETARFSCDVDGEPAPTITWVRAGQPIVSSRRFQITRTQYKSTFEISLVQIADEGSYTVVVENSEGRQEAHFTLTVQRKRIPEKAITSPPRIKSPEPRVKSPEPVKSPKRVKSPEPISTPSKAKSPPGDKTAPVEKVQLPTASPPKIKEQLKAETLGDKVKLSCAVESSVLSIREVAWYKDGKKLKEDHHFKFHYAADGTYELKIHNLTESDKGEYTCEIMGEGGISKTNFQFTGQVFKNIHSQVQSVSETPKSVEKGDKVLAVSTQKKSSAATEEKAAIEEVIKKSIVTEDVKQLQAEIRASSTQMTVSEGQKVTLKANIPGASEVKWVLNGMELRNSDDYRYGISGSNHTLTIKKASNKDEGILTCEGKTDEGTIKCQYVLTFSKEPSNEPAFITQPKSQNVNEGQDVLFTCEVSGDPSPEVEWLRNNQPIAVSSHMRATRSKNTYSLEIRNAAVSDTGKYTVKAKNYHGQCSATASLTVFPLIEEPPKEVVLKTSGDASMHESFSSQSFQMAASKQEASFSSFSSSSMTETKFASMSAKSMSSMKESFVEMSSSSIMGKSSMAQLESSTSKMLKSGVRGVPPKIEALPSDISIDEGKVLTLSCAFSGEPAPEITWYCRGRKITSQDQQGRFHIETSEDLTTLIIMDVQKNDGGIYTLNLGNEFGTDSATVNINIRS

SEQ ID NO: 61 - protein, 4162 aa, Gallus gallus
MTTKAPTFTQPLQSVVALEGSAATFEAHISGFPVPEVSWYRDGQVLSAATLPGVQISFSDGRAKLVIPSVTEANSGRYTIQATNGSGQATSTAELLVTAGTAPPNFSQRLQSMTARQGSQVRLDVRVTGIPTPVVKFYRDGVEIQSSPDFQILQEGDLYSLIIAEAYPEDSGTYSVNATNNVGRATSTAELLIQGEEEAVPAKKTKTIVSTAQISQTRQARIEKKIETHFDARSLTSVEMVIEGAAAQQLPHKAPPRMPPRPTSKSPTPPVITAKAQMARQQSPSPVRQSPSPVRHVRAPTPSPVRSVSPAGRISTSPIRPVKSPSPIRKAQVVTPGAEVLPPWRQEGYSATAEAQMKETRVSTSATEIRTEERWEGRYGLQEQVTISGAAAGEVAAGAKEVRKEPEKTPVPTVIIATDKAKEQERISTAREEISARHEQVHVSHEQIEAGKRAEAVATVVAAVDQARVRSPWETEQVDETYVKKKTLEYGYKEHAVKDHEAQAEHHVATKEVKTVYVPPEKHIPAAEKKEVHVSTEIKRETEAKIEKTIHIEHPRPRTASPHFTVSKIAVPKPDHTYEVSIAGSAMATLEKELSATSAAQKITKPVKPPQLKPHEVKIKPESAPPQFPFTEAAETYKAHYDVETKKEVDVSIKGEAVREDHLLLRKESEAKVTETARVPVPAEIPVTPPTLVWGLKNKTVTEGESVTLECHISGHPQPTVTWYREDYKIESSMDFQITFKAGLARLVIREAFAEDSGRFTCTATNKAGSVSTSCHLHVKVSEETETRETISEKVVTEEKSYVETKDVVMEDVSAAAEEVSGEPVPPFFIRKPVVHKLIEGGSIIFECQVGGNPKPHVLWKKGGVPLTTGYRYKVSYKRETGECKLEISMTFADDAGEYTIVIRNKFGEASATVSLLEEADYEAYIKSQQEMMYQTQVTAYVQEPKVAEVAPPISYGDFDKEYEKEQALIRKKMAKDTVMVRTFVEDEEFHISSFEERLIKEIELRIIKTTLDELLEEDGEEMMIDISESEAIGAGFDLRLKNYRTFEGTGVTFHCKTTGYPLPKIAWYKDGKRIRHGERYHMEVLQDGSASLRLPVVLPEDEGIYTVFASNMKGNAICSAKLYVEPVAPTATPGYMPGPEVMRRYRSISPRSPSRSPARSSPSCSPARRLDETDEGQLERLYKPVFVLKPTSVKCSQGQTARFDLKVVGRPMPETYWFHNGQQVVNDYTHKIVIKEDGTQSLIIVPAMPEDSGEWAVIAQNRAGKASVSVTLSVEAKEDLVRPRFVERLRNVSVKEGSRLHMAVKATGNPNPDIVWLKNSDIIVPHKYPRIRIEGTKGAAALNIESTARQDAAWYTATAINKAGRDTTRCKVNVEVEHAEPEPERRLIIPKGTYKAKEIAAPELEPLHLRYGQEQWEEGDLYDKEKQQKPFFKKKLTSLRLKQFGPAHFECRLTPIGDPTMVVEWLHDGKPLEAANRLRMINEFGYCSLDYGVAYSRDSGVITCRATNKYGTDHTSATLIVKDEKSLVEESQLPEGRRGMQRIEELERMAHEGALPAVAVDQKEKQKPELVLVPEPARVLEGETARFRCRVTGYPLPKVNWYLNSQLIRKSKRFRLRYDGIHYLDIVDCKSYDTGEVKVTAENPEGFIEHKVKLEIQQREDFRSVLRRAPEPRHEPVVTEPGKLLFEVQKIDKPAEATTKEVVKLKRAERITHEKLSEESEELRSKFKRRTEEGYYEAITAVELKSRKKDESYEEMLKKTKEELLHWTKEIPEEEKKALPPEGKITIPTFKPEKVELSPSMEAPKIFERIQSQTVAQGTDAHFRVRVVGKPDPECQWFRNGVQIERTDRIYWYWPEDNVCELVIRDVTADDSASIMVKAVNIAGETSSHAFLLVQAKQLISFIQNLQDVVAKERDSMATFECETSEPFIKVKWFKNGIEIHSGEKYRMHSDRKAHFLSVLAVEMSDADDYSCALVEDESVKTTAKLIVEGAVVEFIKELEDVEVPESFTGELECEVSPEDIEGKWYHGDVELSSNHKYVLASRRGRRILTIKDVNKDDQGEYSFVVDGKRTHCKLKMKPRPMTILQGLTDQKVCEGDIVQLEVKVSVENVEGVWMKDGHEIQSSDRIHIVLDKQSHMLLIEDATQEDSGTYSFSIPGLELSTTGQVTVYSVEIIVPLKDVHVVEGTKAILECKVSAPDVTSSKWYLNDHQIKPDERVQAVCKGTKQRLVITRTHASDEGHYKLMVGKVETSCNVTVEEIEIIRGLHDITCTETQNVSFEVELSHSGIDVIWHFKGQEIKAGPKYKIEARGKIYKLTVVKMMKDDEGEYVFYAGGKKTSGKLIVAGGAISKPLADLTVAESQRAVFECEVANPESEGQWLKNGKPLPMTDQYRAETDGVKRRLNIPAAKMDDMGEYSYEIASSKTSAKLHVEAVKIKKTLKNLTVTETQEAVFSVELSHPDVKGALWIKNGVELESNDKYEISVKGTVHTLKIKHCVVTDESVYSFKLGKIGANARLHVETVKIIKKPKDVTALENAVVSFELSVSHDTVPVRWFHKNVELKQSDKYKMISQRKVHKLMLHNISPADAGEYTAFVGQLECKAKLFVETIHITKTMKSIEIPETKTASFQCEVSHFNVPSVWLKNGVEIEMSEKFKIVVQGKLHQLNIMNTSSEDSAEYTFVCGNDRVSATLTVKPILITSMLEDINAEEKDTITFEVTVNYEGISYKWLKNGVEIKSTDKCQIRTKKLTHSLSIRNVHFGDAAEYSFVAGKAASSATLYVEARHIEFRKHIKDIKVVEKKRAIFECEISEPDVQVQWMKDGQELQIGDRMKIQREKYVHRLIIPSTKMSDAGQYTVVAGGNTSSANLIVEGRDVRIRSIRKEIQVIERQRAEIEFEVNEDDIEPQWYKDGIEINFHYEERYSYVVERRIHRMSIFETTYSDAGEYTFVAGRNRSSVVLYVNAPEPPQIIQELQPTTVESGKPARFCAIISGKPQPKVSWYKDDQQLSPGFKCKFLHDAQEYTLLLIETFPEDSAVYTCEAKNDYGVATTSASLSVEIPEVVSPELEVPVYPPAVIVPLRDAVTSEGQSARFQCRVTGTDLKVSWYSKDREIKPSRFFRMTQFEDTYQLEIAEAYPEDEGTYTFVASNSVGQVTSTAILKLEAPEKIMYEKLEEEIEMEVKVAPILRRRLEPLEVAVNHVAKFTCEVETTPNVKFQWYKAGREIYDGDKYSIRSSNYLSTLEIPRPQVVDCGEYSCKASNQHGSVSSTAFLTVTEPPRFIKKLDSSRLVKQHDSTRYECKVGGSPEIKVTWYKGETEIHPSEKYSMSFVDSVAVLEMHNLSVEDSGDYSCEAQNPAGSASTSTSLKVKAPPAFTKKPHPVQTLKGSDVHLECELQGTPPFQISWYKDKREIRSSKKYKVMSENYLASIHILNVDTADVGEYHCKAVNDVGSDSCIGSVTLRAPPTFVKKLSDVTVVVGETIELQAAVEGAQPISVLWLKDKGEIIRESENLWISYSENVASLKIGNAEPTNAGKYICQIKNDAGFQECFAKLTVLEPAVIVEKPGPVKVTAGDSCTLECTVDGTPELTARWFKDGNELSTDHKYKISFFNKVSGLKILNAGLEDSGEYTFEVKNSVGKSSCTASLQVSDRIMPPSFTRKLKETYGQLGSSAVLECKVYGSPPILVSWFHDGQEITSGDKYQATLTDNTCSLKVNGLQESDMGTYSCTATNVAGSDECSAFLSVREPPSFVKKPEPFNVLSGENITFTSIVKGSPPLEVKWFRGSIELAPGHKCNITLQDSVAELELFDVQPLQSGDYTCQVSNEAGKISCTTHLFVKEPAKFVMKVNDLSVEKGKNLILECTYTGTPPISVTWKKNGVILKHSEKCSITTTETSAILEIPNSKLEDQGQYSCHIENDSGQDNCHGAITILEPPYFVTPLEPVQVTVGDSASLQCQVAGTPEMIVSWYKGDTKLRGTATVKMHFKNQVATLVFSQVDSDDSGEYICKVENTVGEATSSSLLTVQERKLPPSFTRKLRDVHETVGLPVTFDCGIAGSEPIEVSWFKDNVRVKEDYNVHTSFIDNVAILQILKTDKSLMGQYTCTASNAIGTASSSGKLVLTEGKTPPFFDTPITPVDGIIGESADFECHISGTQPIRVTWAKDNQ

SEQ ID NO: 62 - protein, 817 aa, Gallus gallus
RESDHRAWTPVSYTVTRQNAVVQGLTEGKAYFFRIAAENIIGMGPFTETTKELIIRDPITVPDRPEDLEVKAVTKNSVTLTWNPPKYNGGSDITMYVLESRLIGKEKFHRVTKEKMLDRKYTVEGLKEGDTYEYRVSACNIVGQGKPSFCTKPITCKDEIAPPTLDLDFRDKLIVRVGEAFSLTGRYSGKPTPKITWLRDDIVLKEDDRTKIKTTPTTLCLGILKSVREDSGKYCVTVENSTGSRKGFCQVTVVDRPSPPVGPVIFDEVHKDHMIVSWKPPLDDGGSEITNYIIEKKDTHRDLWMPVTSATVKTTCKIPKLLEGREYQVRIYAENLYGISDPLISDEMKAKDRFSVPDAPEQPVIKDVTKDSAVVVWNKPYDGGKPITNYIVEKKETMATRWVRVTKDPIFPSTQFKVPDLLEGCQYEFRVSAENEIGVGNPSPPSKPIFARDPIVKPSPPVNPEAVDKTKNSVDLTWQPPRHDGNGKIIGYLVEYQKVGDEEWKKANLTPDSCPETKYKVTGLTEGLTYKFRVMAVNAAGESEPAYVPDPVEVKDRLEPPELILDANMAREQHVRAGDTLRLSAVIKGVPFPKVSWKKEDKEVSPKADIEVTGVGSKLEIRNTVHEDGGIYSLTVENPAGSKTVSVKVLVLDKPGPPRNLQVSDVRSDSCYLTWKEPEDDGGSVITNYVVERKDVASAQWVSVSSSSKKRSHMAKYLMEGTQYLFRVAAENLFGRGPYVETLKPIKAMDPLHPPGPPKNLHHIDVDKTEVSLVWNRPDRDGGAEITGYLVEYQEDGADEWTKFQTVPMLDCVVTGL

SEQ ID NO: 63 - protein, 595 aa, Gallus gallus
VTTKQTVISRTREGIVTSQEQRHISREKVRKEPEKTPVPTVIIVTAKVKEQERISTAREEISARHEQVHVSHEQIRREDVKPSVPKVVITTDKPKAPVLISQSKEGIATKKEHVSISHEKIKKEAKKTTAVLKIIAPVTVSRTREEITAKPEQMHLAYDQIEAGKRAEAVATVVAAVDQARVRSPWETEQVDETYVKKKTLEYGYKEHAVKAHEAQAEHHVATKEVKTVYVPPEKHIPAAEKKEVHVSTEIKRETEAKIEKTNHIEHPRPRTASPHFTVSKIAVPKPDHTYEVSIAGSAMATLEKELSATSAEQKITKPVKPPQLKPHEVKIKPESAPPPFPFTEAAETYKAHYDVETKKEVDVSIKGGAVREDHLLLRKESEAKVTETARVPVPAEIPVTPTHLVWGLKNKTVTEGESVTLECHISGHPQPTVTWYRDDYKIESSMDFQITFKAGLARLVIREAFAEASGRFTCTATNKAGSVSTSCHLHVKVSEETETRETISEKVVTEEKSYVETQDVVMEDASPPPEEVSGEPVPPFFIRKPVVHTLIVGGSIIFEFHVGGNPKPHVLLKKGGVPLTTGYRYKVSYKRETG

SEQ ID NO: 64 - protein, 32767 aa, Bos taurus
MATQAPTFTQPLQSVVVLEGSTATFEAHISGFPVPEVSWFRDGQVISTSTLPGVQISFSDGRAKLTIPAVTKANSGRYSLRATNGSGQATSTAELLVTAETAPPNFTQRLQSMTVRQGSQVRLQVRVTGIPTPVVKFYRDGAEIQSSLDFQISQEGELYSLLIAEAYPEDSGTYSVNATNSVGRATSTAELLVQGEEVVPAKRTKTIVSTAQISETRQTRIEKKIEAHFDARSIAAVEMVIDGAAGQQLPHKTPPRIPPKPKSRSPTPPSIAAKAQLARQQSPSPIRHSPSPVRHVRAPTPSPVRSVSPAGRISTSPIRSVKSPLLVRKAQTPTMPPGPEVPPPWKQEGYVASSEAEMRETTVTSATQIRTEERWEGRYGIQEQVTISGAAGAAASTTFAAGAVAAGAAEVKQEADKSAAVATVVAAVDMARVREPVISAVEQTAQRTTTTAVHIQPAHEQIRKEAEKTAVTKVVVAADKAKEQEVKARTREVITTKQEQVHVTHEQIRKETEKAFVPKVVISAAKAKEKETKITGEITTKQEQKQITQETIIQKAETAAVSMVVVETAKPTTLETILGAQEEIVTQQDQMHITHEKILKETRKTVVPKVIVATPKVKEQDVVSRTREGITTKREQVQVTHEKMRKEAEKTALSTIAVATAKAKEQETILRTREEMATRQEQIQVTHGKVGVGKKAEAVATVVAAVDQARVREPREPRHVEESYAQQTTLEYGYKEHISATKVAEQPPRPASEPQVVPKAVKPGVIHAPSETHIATTDQMGMHISSQIKKTTDLTSERLVHVDKRPRTASPHFTVSKISVPKTEHGYEASIAGSAIATLQKELSATPSAQKVTKSVKAPTVKPAEARVRAEPTPSPQFPFAETPETFKSQAGIEVKKEVGVSITGVAVREERFEALRERETKVTETARVPAPVEIPVTPPTLVSGLKNVTVIEGESVTLECHISGYPSPKVTWYREDYQIESSIDFQITFQSGIARLLIREAFAEDSGRFTCTAVNEAGTVSTSCYLAVQVSEEFEKETTAVAEKITTEEKRFVESRDVVMTDTSITEEHAGPGEPAAPFFITKPVVQKLVEGGSIVFECQVGGNPKPHVYWKKSGVPLTSGYRYKVSYNKQTGECRLVISMTFADDAGEYTIVIRNKHGETSASASLLEEADYESLMKSQQEMLYQTQVTAFVQEPKVGEIAPGYVYSEYEKEYEKEQALIRKKMAKDTVMVRTFVEDQEFHISSFEERLIKEIEYRIIKTTLEELLEEDGEEKMAVDISESEAIEAGFDLRVKNYRILEGMGVTFHCKMSGYPLPKIAWYKDGKRIKHGERYHMDFLQDGRASLRIPVVLPEDEGIYTAFASNMKGNAICSGKLYVEPAAPLSAPTYIPTPEPVSRIRSISPRSVSRSPIRMSPARMSPARMSPGRRLEETDESQLERLYKPVFVLKPTSFKCVEGQTARFDLKVVGRPMPETFWFHDGQQIVNDYTHKVVVKEDGTQSLLIVPATPSDSGEWTVVAQNRAGKSSISVILTVEAVEHQVKPVFVEKLRNLNIKEGSRLEMKVRATGNPNPDIVWLKNSEIIVPHKYPKIRIEGTKGEAALKIDSTVSQDSAWYTATAINKAGRDTTRCKVNVEVEFAEPEPERRLIIPRGTYRAKEIAAPELEPLHLRYGQEQWEEGDLYDKEKQQKPFFKKKLTSLRLKRFGPAHFECRLTPIGDPTMVVEWLHDGKPLEAANRLRMINEFGYCSLDYAVAYSRDSGVITCRATNKYGTDHTSATLIVKDEKSLVEESQLPEGRKGLQRIEELERMAHEGALTGVTTDQKEKQKPDIVLFPEPVRVLEGETARFRCRVTGYPQPKVNWYLNGQLIRKSKRFRVRYDGIHYLDIVDCKSYDTGEVKVTAENPEGVIDHKVKLEIQQREDFRSVLRRAPEPKPEFHVHEPGKLQFEVQKVDRPVDTTETKEIVRLKRAERITHEKVSEESEELRSKFKRRTEEGYYEAITAVELKSRKKDESYEELLRKTKEELLHWTKELTEEEKKALAEEGKITIPTFKPDKIELSPSMEAPKIFERIQSQTVGQGSDAHFRVRVVGKPDPECEWYKNGVKIERSDRIYWYWPEDNVCELVIRDVTAEDSASIMVKAINIAGETSSHAFLLVQAKQLITFTQELQDVVAKEKDTMATFECETSEPFVKVKWYKDGVEIHTGDKYRMHSDRKVHFLSVLMIDTSDAEDYSCVLVEDENVKTTAKLIVEGAVVEFVKELQDIEVPESFSGELECIITPENIEGKWYHKGVELKSNGKYTITSRRGRQNLTVKDVTKEDQGEYSFVVDGKKTTCKLKMKPRPIAILQGLSDQKVCEGDIVQLEVKVSLENVEGVWMKDGEEVQPGDRVHIVIDKQSHMLLIEDMTKEDAGHYSFTIPSLGLSTHGRVSVYSVDVITPLKDVNVLEGTKAVLECKVSVPDVTSVKWYLNDEQIKPDDRVHAIVKGTKQRLVINRTHASDEGPYKLVVGRVETSCDLSVEKIKIIRGLRDLTCTETQNVVLEVELSHSGIDVLWNFKDKEIKPSSKYKIEAHGKIYKLTVLNMMKDDEGEYTFYAGENRTSGKLTVAGGAISKPLTDQTVAESQEAVFECEVANPDSEGEWLKDGKHLPLSKTIRSESDGRKRRLIIAATKLDDIGEYTYKVATSKTSAKLKVEAVKIKKTLKNLTVTETQDAVFTVELTHPNVKGVQWIRNGVVLESSDKYTVSVKGTVYSLRIKNCAVADESVYGFKLGKLGASARLHVETVKIIKKPKDVTALENATVSFEVSVSHDTVPVKWFHKNVEIKPSDKHRLVSERKVHKLMLQHISPSDAGEYTAVVGQLECKAKLFVETLHITKTMKNIEVPETKTASFECEVSHFNVPSMWLKNGVEIEMSEKFKIVVQGKLHQLIIMNTSTEDSAEYTFVCGNDQVSATLKVTPIMITSMLKDINAEEKDTITFEVTVNYEGISYKWLKNGVEIKSTDRCQMRTKKLTHSLNIRNVHFGDAAEYTFVAGKATSTATLYVEARHIEFRKHIKDIKVLEKKRAMFECEVSEPDITVQWMKDGQELQLVDRIKIQKEKYVHRLLIPSTRMSDAGKYTVVAGGNMSSANLFVEGRDVRIRSIKREVQVIEKQRAVVEFEVNEDDVDAHWYKDGIEINFQVQERHQYVVERRIHRMFISETRHSDAGEYTFVAGRNRSSVTLYVNAPEPPQILQELQPITVQSGKPARFCAVISGRPQPKISWYKEEQLLSTGFKCKFLHDGQEYTLLLIEAFPEDAAVYTCEARNDYGVATTSASLSVEVPEVVSPDQEMPVYPPAIVSPLQDAVTSEGRPAHFQCRVSGTDLKVSWYSKDKKIKPSRFFKMTQFEDTYQLEVAEAFPEDEGIYTFVASNAVGQVSSTATLRLEAPEAMLHEQIEMEMKEFSISLLSGKEERPQTSSWDLQLFDINETLEPLSEPSVYSPKFDSKKEGNAPVFIKEVSNAEISIGDVAKLFVTVTGIPTPQIQWFFNGAMLTPSADYKFVFDGNDHSLIILFTKLEDEGEYTCIASNEYGQAMCSAYLKINSEAEGHEEPESAEKSLEKLQGPCPPYFLKELKPVHCVQGLPAIFEYVVLGEPAPTVLWFKENKQLCTNVYYTIIHNPDGSGTFIVNDPQKEDGGLYVCKAENVWGGSTCAAELFVLLEDTDMTDATCKAAPTPEAPEGFPHTSVKDPAVETFDSEQEVVTFVKDAILKASLIAEEKQQFSYEHVVKTNELSSQVTLKAEQLQSTVILEHDMPTPESTRELLSISGTIHVQPIKELPPSLQLQIAQSQDTLPREDTLMCQEPESQVVLSDTEKIFPSFMSIEEISLSTVESLQTLLAEPEESYPQPLIKETPAHSYPTSVAEEVLLSKDKTVSAVDRGQRETSQKQESQNALFLNQNLAEGHAQSLQGPDVTVSRVSSEHTCTESEILMESVDQLDSAGQDFAARIEEGQSLRFPLACEEKQVLLKEEHSDTLALPLNQTTEYKKEPMAVNGVQEVQGSDFLSKESLLPGIPEEQRLNLKTQIRSALQAAVASEQLSLFSEWLRNIEQVEVKAIDFTQEPNCIMCTYLITSVKSLTEEVTVTIKGIDPQMADLKTELKEALCSICEEMNILTAEEPGIEKGATVVLQEDVSFSSSQKLEAITEPEAESKYLVSKEEISYFKVESQVKAVGTTTASAAVSDEKQDELPKPSEEKEKVSEGGTEEVGTVEIQEAEDEEDRKLGEDGPDVQTPLVDTIAEEGDIISLTSCITNAKEVNWYFESKLVPSDEKFKCLQDQNTYTLVIDKVNREEHQGEYTCEALNDNGKATTSAKLTVVKRAAPVIRRRIEPLEVALGHLAKFTCEIHSAPNVRFQWFKAGREIYESDKCSIRSANYVTTLEILRTQVVDCGEYTCKASNEYGSVSCTATLTVTEAYPPTFFSRPKSVTTFVGKAAKFLCTVTGTPVIETIWQKDGMALSPSPTCKISDVDNKHILELSNLTVHDKGVYSCKASNKFGADTCQAELDIIDKPHFIKELEPVQSAINKKIHLEGQVDEDRKVTITWSKNGQKLPPGKDYKIYFEDKIASLEIPLAKLKDSGTYVCTASNEAGSSSTSATVTIREPPSFVKKVDPSYLMLPGESARLHCRLKGSPVIQVTWFKNNKELTESNTIRMSFVNSEAVLDITDVKVEDSGTYSCEAVNDVGSDSCSAEIVVKEPPSFIKTLEPADIVRGTNALLQCEIAGTGPFEISWFKDKKQIRSSKKYRLFSQKSTVSLEIFSFNSADVGDYECVVANEVGKCGCVATHLLKVEPPTFVKKVDDFTALAGQTVTLQAAVRGSEPISVTWMKGQEIIKEDGKIKMSFANGVAVLIIPDVQISFGDKYTCLAENEAGSQTSVGELIVKEPAKIIERAELIQVTAGDPATLEYTVAGTPELKPKWYKDGRPLVASKKYRISFKNNVAQLKFYSAELHDSGQYTFEISNEVGSSSCETTFTVLDRDIAPFFTKPLRNVDSVVSGTCRLDCKIAGSLPMRVSWFKDGKEVTSSDRYRIAFVEGTASLEISRVDMSDAGNFTCRATNSVGSKDCSGALIVQEPPSFVTKPASKDILPGSAVFLKSTFQGSTPFTIRWFKGDKELVSGGNCYINKEALESSLELYSVKTTDSGTYTCKVSNVAGAVECSANLFVKEPATFVERLELSQLLKKGDTTQLACKVTGTPPIKITWFANDREIKESSKHKMSFVESTAVLRLTDIAVEDSGEYMCEAQNEAGSDHCSSILIVKESPYFTKEFKPIEVLKEYDVMLLAEVAGTPPFEITWFKDNTTLRSGRKYKTFIQDRLVSLQILKFVAADVGKYQCRVTNEVGSSTCSARVTLREPPTFVKKIESTSSLRGGTAAFQATLKGSLPITVTWLKDNEEITEDDNIRMTFENNVASLYLSGIEVKHDGKYVCQAKNDAGIQRCFAVLSVKEPATIIEEAVSIDVTQGDPATLQVKFSGTKEITAKWFKDGQELTLGQKYKISVTDTVSILKIISTEKRDSGEYTFEVQNDVGRSSCKASINVLDLIIPPSFTKKLKKMDSIKGSSIDLECIVAGSHPISIQWFKDDQEITASEKYKFSFHDNTAFLEISQLEGSDSGTYTCSATNKAGHNQCSGHLTVKEPPYFLEKPQSQDVNPNTRVQLKALVGGTAPMTIKWFKDNKELHSGAARSVWKDDTSTILELFSAKAADSGTYICQLSNDVGTATTKASLFVKEPPQFIKKPSPVLVLRNGQSTTFECQITGTPEIRVSWYLDGNEITAVEKHGISFIDGLATFQISGARVENSGTYVCEAQNDAGTASCSIELKVKEPPTFIRELKPVEVVKDSDVELECEVMGTSPFQVTWLRNNKEIRSSKKYTLTDRVSVFNLNINRCDPSDTGDYQCIVSNEGGSCSCSARVSLKEPPSFIKKIENITTVLKSSATFQSTVAGSPPISITWLKDDQILDEDDNVHISFVNNVATLQIRSVDNGHSGRYTCQAKNESGVERCYAFLLVQEPAQIIEKAKSVDVTERDPVTLECVVAGTPELKVKWLKDGKQIVPSRYFSMSFENNVASFRIQSVMKQDSGEYTFKVENDFGSSSCDAYLRVLDQNIPPSFTKKLTKMDKVLGSSIHMECKVSGSLPISAQWFKDGKEISTSAKYRLVCHENTVSLDVNNLELEDTANYTCRVSNVAGDAACSGILTVKEPPSFLVKPERQQAIPDSTVEFKAVLKGTPPFKIKWFKDDVELASGPKCFIGLEGSTSFLNLYSVDASKTGQYTCQVTNDVGSDSCTTTLLVTEPPKFVKKLEATKIVKAGDSARLECKITGSPDIRVVWYRNEHELPASDKYRMAFIDSVAVLQMNYLGTEDTGDFICEAQNPAGSTSCSTKVIVKEPPVFSSFPPVVETLKNAEVSIECELSGTPPFEVVWYKDKRQLRSSKKYKIASKNFHASIHILNVDTLDIGEYHCKAQNEVGSDTCICIVKLKEPPRFVSKLNSLTVVAGEPAELQASIEGTQPISVQWLKEKEEVVRESENIRITFVENVATLQFSKAEPANAGKYICQIKNDGGMRENMATLSFISEPAVIVEKAGSMTVTVGETCTLECKVAGTPELSVEWYKDGKLLTSSQKHKFSFYNKISSLKILSVEKQDAGTYTFQVQNNVGKSSCTAVVDVSDRMVPPSFTRRLKDTIGVLGTSCILECKVAGSSPISVAWFHGKTKIVSGAKYQTTFSDNVCTLQLNSLDSSDMGSYTCVAANVAGSDECRAVLAVQEPPSFVKEPEPLEVLPGKNITFTSVIRGTPPFKVGWFRGARELVKGDRCNIYFEDTVAELELFNVDISQSGEYTCVVSNNAGQTSCTTRLFVKEPAVFVKKLSDHSVEPGKSIILESTYKGTLPISVTWKKDGFNITPSEKCSIVTTEKTCILEILNSTKRDAGRYSCEIENEAGRDVCEALVSTLEPPYFVTELEPLEASVGDSVSLQCQVAGSPEITVSWYKGDTKLRPTPEYRTYFTNNVATLVFNKVNINDSGEYTCKAENSIGTASSKTVFRIQERQLPPSFARQLKDIEQTVGLPVTLTCRLNGSAPIQVSWYRDGVLLRDDENLQTSFVDNVATLKILQTDLSHSGQYSCSASNPLGTASSSARLTAREPKKSPFFDIKPVSIDIIAGESADFECHVTGAQPMRITWSKDNKEIRPGGNYTITCVGNTPHLRILKVGKGDSGQYTCQATNDVGKDMCSAQLSVKEPPKFVKKLEASKVAKQGESIHLECKISGSPEIKVSWFRNDSELHESWKYNMSFVDSVAVLTINEASAEDSGDYICEAHNGVGDASCSTALTIKAPPVFTQKPSPIGALKGSDVVFQCEISGTPPFEVVWVKDRKQVRSSKKFKITSKNFDASLHILNLEAADVGEYYCKATNEVGSDTCVCTLKFKVEPPRFVKKLSDTSTLVGDAVELRAVVEGFQPISVVWLKDKGDVIRESENTRISFVDNVATLQLGSPEASDSGKYVCQIKNDAGMRECSAILTVLEPARIIEKPEPMTVTTGNAFALECVVTGTPELSAKWFKDGREIAADSKHHITFVNKVASLKIPCAEMSDKGLYSFEVKNSVGKSTCTVSVHVSDRIVAPSFIRKLKDINAIVGASVVLECRVSGSAPISVGWFQDGNEIVSGPKCQSSFSENVCTLNLSFLEPSDTGTYTCVAANVAGSDECSAVLTIQEPPSFEQTPDSVEVLPGTSLTFTSVIRGTPPFKVKWFKGSRELVSGESCSISLEDFVTELELFEVEPLQSGDYSCLVTNDAGSASCTAHLFVKEPATFVKRLADFSVETGSPIVLEATFTGTPPISVSWMKNEFALTQSQNCSITMTEKSTILEILDSTIEDYAQYSCLIENEAGQDICDAVVSVLEPPYFIEPLEHVEAVIGEPITLQCKVDGTPEIRISWYKEHTKLRSAPAYKMQFKNNVASLVINKVDHSDVGEYTCKAENIVGAVASSSVLVIKERKLPPSFARKLKDVQETLGFPVAFECRINGSEPLQVSWYKDGVLLKDDANLQTSFVHNVATLQILQTDQSHVGQYNCSASNPLGTASSSAKLVLLEHEVPPFFDLKPVSVDLALGESGSFKCHVTGTAPMKITWAKDNREIRPGGNYKMTLVENTATLTVLKIGKGDAGQYTCYASNVAGKDSCSAHLGVQASIEPPRFIKKLEPSRIVKQDESTRYECKIGGSPEIKVLWYKGETEIQESSKFRMSFVDSVAVLEMHGLSVEDSGDYTCEACNAAGSASSTTSLKVKALEPPIFRKKPHPVETLKGADVHLECELQGTPPFQVSWHKDKRELRSGKKYKIMSENFLTSIHILSVDAADVGEYQCKATNDVGSDTCVGSITLKAPPRFVKKPSDVSTIVGEEVQLQATVEGAEPISVVWFKDKGEIVRESDNIWISYSENTATLQFSRAETANAGKYTCQIKNDAGMQECSATVSILEPAAIVEKPESITVTTGDTCTLECSVTGTPELTTKWFKDGKELTSDNKYKISFFNKVSGLKIINVAPSDSGVYSFEVQNPVGKDSCTASVQVSDSDRIVPPSFTRRLKETNGLSGSSVVMECKVYGSPPISVSWFHERNEISSGRKYQTTLTDNTCALTVNMLEESDAGNYTCIATNVAGSDECSAPLTVREPPSFVQKPDPMDVLTGTNVTFTSIVKGTPPFSVSWFKGSTELVPGDTCNVSLEDSVAELELFDVDTSQSGEYTCIVTNEAGKVSCTTHLYVKAPARFVKKLNDYSIEKGKPLILEGTYTGTPPISVTWKKNGINVTPSQRCNITTTERSAILEIPSSTVEDAGQYNCYIENTSGKDSCSAQILILEPPYFVRQLEPVKVTVGDSASLQCQLGGTPEIAVSWFKGDTKLRPTATYKMHFRNNIATLVFNQVDSNDSGEYICRAENSVGEVSSSTFLTVQEQKLPPSFSRQLRDVQETVGLPVVFECAVSGSEPISVSWFKDGRPVKDSPNIQASFLDNVATLNIFQTDRSFAGQYSCTATNPIGSASSSARLILTEGKNPPFFDIPLAPVDAVVGESADFECHVTGTQPIKVAWAKDNREIRSGGNYQISYLENSAHLTILKVDKGDSGQYTCYAVNEVGKDSCTAQLNIKERLIPPSFTKKLSETVEETEGNSFKLEGRVAGSQPISVAWYKNNIEIHPTSNCEITFKNNTLLLQIKRAGMDDAGLYTCKVSNDAGSALCTSSIVIKEPKKPPVFDQHLTPVTASEGEFVQLSCHVWGSEPIRIQWLKAGREIKPSDRCSFSFANGTAVLELKDVTKADAGDYVCKASNVAGSDTSKSKVTIKDKPAAVPAAKKAAVDGKLFFVSEPQSIRVVEKTTATFIAKVGGDPIPNVKWTKGKWRQLNQGGRILIHQKGDEAKLEIRDTTKTDSGLYRCVAFNKHGEIESNVNLQVDERKKQEKIEGDLRAMLKKTPVLKKGAGEEEEIDIMELLKNVDPKEYEKYARMYGITDFRGLLQAFELLKQTEGEETHRLEIEEIEKSEKDEKEFEELVSFIQQRLSQTEPVTLIKDIENQTVLKDNDAVFEIDIKINYPEIKLSWYKGTEKLEPSDKFEISIDGDRHTLRVKNCQLKDQGNYRLVCGPHIASAKLTVIATEPAWERHLQDVTLKEGQTCTMTCQFSVPNVRSEWFRNGRILKPQGRYKTEVEHKVHKLTIADVRAEDQGRYTCKHEDLETSAELRIEAEPIQFTKRIQNIVVSEHQSATFECEVSFDDAIVTWYKGPTELTESQKYNFRNDGRCHYMTIHNVTPDDEGVYSVIARLEPRGEARSTAELYLTTKEIKLEMKPPDIPDSRVPIPTMPIRAIPPEEIPPTAVPPIPLLLPLPEEKKPPEKRVEVTKKAVKKDAKKVVAKPKEEAPPPKVIEVPKKPPRPTALIPAEAPEIIDVSSKAEEVKITTITRKKEVQKEKEAVYERKQAVYEEKKVYIESLEEPYDELEVETYTEPYEEPYYEEPEEDYEETQVEAKREVHEEWEEDFEEGQEYYEREEGYDEGEEEWEETYQEREVVQVQKEVYEESRERKIPAKVPEKKELPPPKVVKKPVVEKIEKTSRRMEEEKVQVTKVPEVSKKIVPQKPSRTPVQEEIIEVKVPAVHTKKMVISEEKMFFAAHTEEEEEVSVTVPEVQKKTVTEEKVHVAVSKKIEPPPKVPEPPKKPEEVVPVPVPKKVEPPPAKVPEVPKKPVPEEKKPVPVPKKEPAAPPKVPEVPKKPVPEEKVPVPIAKKKEAPPAKVPEVQKRVVTEEKITIVTEREESPPPAVPEIPKKKLPEEKRPVPRKEEEVPPPKVPAVPKKPVPEEKVPVPVPVAKKAPPPRAEVSKKMVMEEKRFAAEEKLSVTVPQRVEVMRHEVSAEKEWRYSEEEERVSVSVYREEEREEEEVEVTEYEVMEEPEEYIVEEEEHFISEEVEAEPAEESFQVPEKKIIPKPKIPAKVEEPPPAKVPEAPKKIVPEKKIPAAVPKKEKVPPTKVPEEPKKPVPEKRAPPKVAKIEEPPPTKVTERHMQITQEEKVHVAVTKKVEPPRPKVPEEPKRAVPEEKFPKLKPRKEEEPPAKVTELRKRAVKEEKVSIEVAKREPPAAKEVTVTAEKEWAYTKEEEAVSVEREEEYEEYEEYDYKEFEEYEPTEEYDQYEEYEEREFEHYEEYKEHEEYVTEPEKPVPVKPIQEEPVPTKPKAPPAKVPKKVIPEEKVPVPIPKKLKPPPPKAREEAKKVVEEKIQISVIKREKEQVTEPAAKVPMKPKRVVTEEKVPVPKKEVAAPVRVPEVPKKEEPEEIAFEEEVVTHEEEYYEEEEEEEEYIHEEEEIITEEEVVPVKVFKVPEVPKKPVPEEKKPVPVPKKKEAPPAKVPEIPKKPEEKVPVPVPKKEKAPPAKVPEVPKKPVPEEKVPVPEEKVPVPVPKKVEAPPAKVPEVPKKPVPEKKVPVPAPKKVEAPPAKVPEVPKKVLPEEKKPTPIRKKVEPPPPKVPKKREPVPVPIPAALLREEKVVHKEEIVVEEEEVLPEEEEISPEEEVPLEEEEEEEEVLPEEEEVPPEEEEVPPEEEEVPPEEEEFVPEEEVVPEKEEVLPEIKPKVPVPARVPEVKKKVPEKKVIIPKKEEVPPAKVPEVPKKVEEKRIIVPEEEEVPPVEVFEEPEEPIPEEEIPEEAPIVEEVEEEAPPRVPEVVKKAVPEAPTPVPKKVEVPPAKVPKKVPEEKPPVPVQKKEAPPAKVPEVPKKVPEKKVPVPKKEVVPPAKGRAVLEEKVSVAFHKEEVVEERTELEIVEAQEEALEEEFHEVEEYFEEEEFHEVEEFLKVEKYRAEEEVHRAEEVHRVIEVLEAEEEEAYEKPKAPPKGPEISEKVIPPKKPPTKVVPRKEPPAKVPEVPKKIVVEEKVHVPEEPKVAPAKVPEAPKEVVPEKKVPAAPPKKPEVPPVTVPEAPKEVVPEKKVPVVPPKKPEVPPAKVPEVPKAAVPEKKVPEAIPPKPESPPPAVPEAPKEVVPEKKVPVMPPKKPEVPPAKVPEAPKEVVPEKKVPVMPPKKPEVPPAKVPEVPKAAVPEKKVPEAIPPKPESPPPAVYEEPEEIAPEEPPVEVVEEPEPVPAPPPKVTVPPKKPVPEKKPPAVVAKKPEPPPAKVPEVPKEVVPEKKVPPVVPKKPEVPPPKVPEVPKEVVPEKKVAVPKKPEVPPAKVPEVPKKPVLEEKPAIPIPEKVESPPPEEEEEPVPVVEEEEPVPVVEEEEPVPVVEEVEPEAPPPAVPEEPKKIVPEKKVPVIKKPEPPPPKEPEPEKKVIEKPKLKPRPPAPPPAPPKEDVKEKIFQLKAVSKKKVPEKPAVPEKVELTPLKVAGGEKKVRKLLPEPKPQPKEEVILKSVLRKRPEEEEPKVEPKKVEKIKKPAVPEPPPKAVEEVEAPPAVTKKERKIPEPTKVPEIKPPIPLPAPEPKPKPEAEVKIIKPPPVEPPPTPIAAPVTVPVVGKKAEAKAPKEEAAKPKGPIKGVAKKTPSPIEAERKKLRPGSGGEKPPDEAPFTYQLKAVPLKFVKEIKDIVLTEAESVGSSAIFECLVSPSTAVTSWMKDGSNIRESPKHRFIADGKDRKLHIIDVQLSDAGEYTCVLRLGNKEKTSTAKLIVEELPVRFVKTLEEEVTVVKGQPLYLSCELNKERDVVWRKDGKIVVEKPGKIVPGVIGLLRALTINDADDSDAGTYTVTVENANNLECSSCVKVVEVIRDWLVKPIRDQHVKPKGTAVFTCVIAKDTPNIKWYKGYDEIPWEPTDKTEIIRDGNHIHLKVKNAMPEDIDEYAVEIEGKRYPAKLTLGEREVELLKPIEDVTIYEKESASFDAEISEVDVPGQWKLKGELLRPSPTCEIKAEDGKRFLTLHNVKLDQAGEVLYQALNAVTTAILTVKEIELDFAVPLKDVTVPEKRQARFECVLTREANVIWSKGPDIIKSSDKFDIITDGKKHILVINNSQFDDEGVYTAEVEGKKTSARLFVTGIRLKFISPLEDQTVKEGETATFVCELSHEKMHVVWFKNDAKLHTSRTVLISSEGKTHKLEMREVTMDDISQIKAQVKDLSSTANLKVIEADPYFTVKLHDKTGVEKDEIVLRCEVSKDVPVKWFKDGEELLPSPKHSIKADGLRRILKIKKADLKDKGEYVCDCGTDTTKANVTVEARLIKVEKPLYGVEVFVGETARFEIELSEPDVHGQWKLKGEPLTASPDCEIIEDGKKHILVLYNCRLDMTGKVSFQAANAKSAANLKVKELPLIFITPLSDVKVFEKDEAKFECEVSREPKTYRWLKGTQEITGDDRIELIKDGTKHSLVIKSAAFEDEAKYIFEAEDQHTSGKLIIEGIRLKFLTPLKDVTAKERESAVFTVELSHDNIRVRWFKNDQRLHTSKFVSMDDEGKTHSITFRNLSIDDTSQIKVEAMGLSSEAKLTVLEGDPYFTGKLQDYTGVEKEEVILQCEISKADAPVKWFKDGQEIKPSKNAVIKADGKKRMLILKKPLKSDIGQYTCDCGTDKTSGKLNIEDREIKLVRPLYSVEVMETETARFETEISEDDIHANWKLKGEALLQTPECEIKEEGKTHFLILHNCRLDQTGGVDFQAANVKSSAHLRVKPRVIGLLRPLKDITVTAGETATFDCELSYEDIPVEWYLRGKKLEPSDKVVMRSEGRVHTLTLRDVKLEDAGEVQLVAKDFKTQAKLFVKEPPVEFTKPLEDQTVEEEATAVLECEVSRENAKVKWFKNGTEILKSKKYEIVADGRVRKLIIHGCTPEDIKTYTCDAKDFKTSCNLNVVPPHVEFLRPLTDLRVKEKEMARFECEISRENAKVHWFKDGAEIKKGKKYDIISKGAVRILVINKCLLDDEAEYSCEVRTARTSGMLTVLEEEAVFTKNLANIEVSETDTVKLVCEVSKPGAEVTWYKGDEEIIETGRYEILTDGRKRILIIQNAHLEDAGNYNCRLPSSRTDGKVKVHELAAEFISKPQNLEILEGEKAEFVCSISKENFEVQWKRDDKTLESGDKYDVIADGKKRVLVVKDATLQDMGTYVVMVGAARAAAHLTVIEKLRIIVPLKDTRVKEQQEVVFNCEVNTEGAKAKWFRNDEAIFDSSKYIILQKDLVYTLRIRNAQLDDQANYNVSLTNHRGENVKSAANLIVEEEDLRIIEPLKDIETMEKKSVTFWCKVNRLNVTLKWTKNGEEVAFDNRVLYRIDKYKHSLIIKDCGFPDEGEYVVTAGQDKSVAELLIIEAPTEFVEHLEDQTVTEFDDAVFSCQLSREKANVKWYRNGREIKEGKKYKFEKDGSIHRLIIKDCRLDDECEYACGVDDRKSRARLFVEEIPVEIIRPPQDILEAPGADVVFLAELNKDKVEVQWLKNNMIIVQGDKHQMMSEGKIHRLQICDIKPRDQGEYRFIAKDKEARAKLELAAAPKIKTADQDLVVDVGQPLTMVVPYDAFPKAEAEWFKENEPLSSKTVDTTAEQTSFRILKAKKEDKGRYKVVLQNKHGKAEGFINLKVIDVPGPVRNLEVTETFDGEVSLAWEEPLTDGGSKIIGYVVERRDIKRKTWVLATDRADSCEFTVTGLQKGGVEYLFRVSARNRVGTGEPVETDSPVEARSKYDVPGPPLNVTVTDVNRFGVSLTWEPPEYDGGAEITNYVIELRDKTSIRWETAMTVRAEDLSATVTDVVEGQEYSFRVRAQNRIGVGKPSAATPFIKVADPIERPSPPVNLNASDQTQSSVQLTWEPPLKDGGSPILGYIIERCEEGKDNWIRCNKKLVPELTYKVTGLQKGNKYLYRVSAENEAGVSDPSEILGPLTADDADAEPTMDLSAFKDGLEVIVPNPIKILVPSTGYPRPTATWSFGDKVLEAGDRVKMKTLSAYAELVISPSERPDKGIYTLKLENRAKAISGEIDVNVIARPSAPRELKFGDITKDSVHLTWEPPEDDGGSPLTGYVIEKREVSRKTWTKVIDSVTDLEFTVPDLLQGKEYLFKVCACNKCGPGEPAYVDEPVNMSAPATVPDPPENVKWRDRTAKSIFLTWDPPKHDGGSRIKGYIVEKCPRGSDRWVACGEPVADTKMEVTGLEEGQWYAYRVKALNRLGASKPSKPTEEIQAIDTQEAPEIFLDVKLLAGITVKAGTKIELPATVTGKPEPKITWTKADMLLKQDKRITIENVPKKSTVTIMDSKRSDTGRYIIEAVNVCGRATAVVEVNVLDKPGPPAAFDITDVTNESCLLTWNPPRDDGGSKITNYVVERRATDSDMWHKLSSTVKDTKFKATKLTPNKEYIFRVAAENMYGVGEPVQATPITAKFQFDPPGPPTRLEPSDITKDAVTLTWCEPDDDGGSPITGYWVERLDPESDKWVRCNKMPIKDTTYRVKGLTNKKKYRFRVLAENLAGPGKPSKSTEPILIKDAIDPPWPPGKPVVKDIGRTSLMLNWTKPEHDGGAKIDSYVIEMLKTGTEDWVRVAEGVPTTQHLLPGLMEGQEYSFRVRAVNKAGESEPSEPSDPVLCREKLYPPSPPRWLEVINITKNTADLKWTVPEKDGGSPITNYIVEKRDVRRKGWQTVDTTVKDTKCTVTPLTEGSLYVFRVAAENAIGQSDYCEVEDSVLAKDTFTTPGPPYALAVVDVTKRHVDLKWEPPKNDGGRPIQRYVIEKKEKLGTRWVKAGKTSGPDCHFRVTDVIEGTEVQFQVRAENEAGVGHPSEPTEILKIEDPTSPPSPPLDLHVTDAGRKHIAIAWKPPEKNGGSPIIGYHVEMCPVGTEKWMRVNSRPIKDLKFKVEEGVVPDKEYVLRVRAVNAVGVSEPSEISENVVAKDPDCRPTIDLETHDIVVIEGEKLSIPVPFRAVPVPTVSWHKDGKEVKASDRLTMKNDHISAHLEVPKSVRADAGIYTVTLENKLGSATASINVKVIGLPGPCRDLKASDVTKSSCKLTWEPPEYDGGSPILHYVLERREAGRRTYIPVMSGENKLSWTVKDLIPNGEYFFRVKAVNKIGGGEYIELKNPVIAQDPKQPPDPPVDVEVHNPTAEAMTITWKPPLYDGGSKIMGYIIEKIAKGEERWKRCNEHLVPVLTYTAKGLEEGKEYQFRVRAENAAGISEPSRATPPTKAVDPIDAPKVIMKTSLEVRRGDEIALDAIISGSPYPTITWLKDESIITPEEIKKRVEPLVRRRRGEVQEEQPFVLPLTQRLSIDNSQKGESQLRVRDSVRPDHGLFMIKAENDHGIAKAPCTVCVLDIPGPPINFVFEDMRKTSVLCKWEPPLDDGGSEILNYTLEKKDKTKPDSEWMVVTSTLRHCKYSVTKLIEGKEYLFRVRAENRFGPGPPCVSKPFMAKDPFEPPDAPDKPIVEDVTSNSMLVTWNEPKDNGSPILGYWLEKREVNSTHWSRVNRNLLNSLKTKVDGLLEGLTYVFRVCAENAAGPGKFSPPSDPKTAQDPISPPGPPVPRVTDTSSTTIELAWEPPAFNGGGEIVGYYVYKQLVGTNEWSRCTEKMIKPREYTVREIREGADYKLRVTAVNVAGEGPPGETEPVTVAEPQAEPPTVELDVSVKGGIQIMAGKTLRIPAVVTGRPVPTKVWTIEEGELDKDRVEIENVGTKSELIIKNALRKDHGRYVITATNSCGSKFAAARVEVFDVPGPVLDLKPVVTNRKMCLLNWSDPEDDGGSEITGFIIERKDAKMHTWRQPIETERSKCDITGLLEGQEYMFRVIAKNKFGCGPPVEIGPILAVDPLGPPTSPERLTYTERTKSTITLDWKEPRSNGGCPIQGYIIEKRRHDKPDFERVNKHLCPTTSFLVEDLDEHQMYEFRVKAVNEIGESEPSLPLNVVIQDDEVPPTIKLRLSVRGDTIKVKAGEPVNIPADVTGLPMPKIEWSKNETVIEKPTDALKITKEEVSRSEAKTELSIPKATREDKGTYTVTASNRLGSVFRNVHVEVYDRPSPPRNLAVTDIKAESCYLTWDAPLDNGGSEITHYIIDKRDASRKRAEWEEVTNSAVERRYGIWKLIPNGQYEFRVRAVNKYGISDECKSDKVVIQDPYRTPGPPGKPKVLERTKGSMLVSWTPPLDNGGSPITGYWLEKREEGGAYWSRVSRAPITKVGLKGVEFNVPRLIEGVKYQFRAMAINAAGVGPPSEPSDPEVAGDPIYPPGAPSRPEVKDKTKSSITLAWKPPAKDGGSPIKGYIVEMQEEGTTDWKSVNEPDKLLPTCECVVPNLKELKKYRFRVKAVNEAGESEPSDTTGEIPATDIQEVPEVFIDIGAQDCLICQAGTQIRIPAVIKGRPTPKSSWEFDGKAKKAMKDGVHDIPEDAQLETAENSSVIIIPECKRSHSGKYSITAKNKAGQKTANCRVKVMDVPGPPKDLKVSDITRGSCRLSWKMPDDDGGDRIKGYVIEKRTIDGKAWTKVNPNCVSTSFVVPDLIAGQEYFFRVRAENRFGVGAPAETIQRTTARDPIYPPDPPIKLKIGLVTKNTVHLSWKPPKNDGGSPVTHYIVECLAWDPTGTKKEAWRQCNKRDVEELEFTVEDLIEGGEYEFRVKAVNAAGVSKPSATVGPVIVKDQTCPPAIELKEFMEVEEGTDVNIVAKIKGVPFPTLTWFKAPPKKPDNKEPIVYDTHVNKLVVDDTCTLVIPQSRRSDTALYTITAVNNLGTASKEMRLNVLGRPGPPVGPIKFESISADQMTLSWLPPIDDGGSKITNYVIEKREANRKTWVRVSSEPKECTYTIPKLLEGHEYVFRIMAQNKYGIGEPLDSEPETARNLFSVPGAPDKPTVSSVTRNSMTVNWEEPEYDGGSPVTGYWLEMKDTTTKRWKRVNRDPIKAMTLGVSYKVTGLIEGSDYQFRVYAINAAGVGPASLPSDPATARDPIAPPGPPFPKVTDWTKSSADLEWSPPLKDGGSRVTGYIVEYKEEGKEEWEKAKDKEVRGTKLVVTGLKEGAFYKFRVRAVNIAGIGEPGEVTDAIEMKDRLELPDLQLDASVRDRIVVHAGGVIRIIAYVSGKPPPTVTWNMNERALPQEATIETTAISSSMVIKNCQRSHQGVYSLLAKNAAGERKKTIIVDVLDVPGPVGIPFLAHNLTNDSCKLTWFSPEDDGGSPITNYVIEKREADHRAWTPVTYTVTRHNATVQGLIQGKAYFFRIAAENSIGMGPFVETTDALVIRDPITVPERPEDLEVKEVTKESVTLTWNPPKYDGGSDIINYVLESRLIGTEKFHKVTSDNLMSRKYTVKGLKEGDTYEYRVSAVNIVGQGKPSFCTKPITCKDELAPPTLDLDFRDKLTIRVGEAFALTGRYSGKPKPKVSWFKDEADVLEDDRTHIKTTPTTLALEKLKAKRSDSGKYSVVVENSTGSRKGVCQVNVVDRPGPPVGPVIFDEVTKDYMVISWKPPLDDGGSEITNYIIEKKEVGKDVWMPVTSASAKTTCKVSKLLEGKDYIFRIHAENLYGISDPLVSDSMKAKDRFRVPDAPDQPIVTEVTKDSALVSWNPPHDGGKPITNYILEKRETMSKIWARVTKEPIHPYTKFRVPDLLEGCHYEFRVSAENEIGIGDPSPPSKPVFAKDPIAKPSPPVNPEAIDTTCNSVDLTWQPPRRDGGSKILGYIVEYQKVGDEEWKRANHTPESCPETNYKVTGLRDGQSYKFRVIAVNAAGESDPAHVPEPVLVKDRLEPPELILDANMAREQHIRVGDTLRLSAIIKGVPFPKVTWKKEDRAAPTKARIDVTPVGSKLEIRNAAHEDGGIYSLTVENPAGSKTVSVKVLVLDKPGPPRDLEVSEIRKDSCYLTWKEPLDDGGSVITNYVVERKDVASTEWSPLSTTSKKKSHLAKHLNEGNQYVFRVAAENQYGRGPFVETPKPIKAVDPLHPPGPPKNLHHVDVDKTEVSLVWNKPDRDGGSPITGYLVEYQEEGTPDWIKFKTVTNLACVVTGLQQGKTYRFRVKAENIVGLGLPDTTIPIECQEKLVPPSVELDVKLIEGLVVKAGTTVRFPAIIRGVPIPTAKWTTDGNEIKTDEHYTVETDNFSSVLTIKNCLRKDTGEYQITVSNAAGTKTVAVHLTVLDVPGPPTGPINILEVTPEYMTISWLPPKDDGGSPVINYIVEKKDTKKDTWGVVSSGSSKTKLKVPHLQKGYEYVFRVKAENKIGIGPPLDSVPTVAKHKFSPPSPPGKPVVTDITENAATVAWTLPKSDGGSPITGYYLERREVTGKWVRVNKTPLVDLKFRVTGLYEGNTYEFRVFAENLAGLSGPSPSSDPIKACRPIKPPGPPINPKLKDKTRESADLVWTKPLSDGGSPILGYVVECQKAGTTQWDRINKDELIRQCAFRVPGLIEGNEYRFRIKAANIVGEGEPRELAESVIAKDILHPPEVELDVTCRDVITVRVGQTIRILARVKGRPEPDITWSKEGKALVRDKRVNIIHELPRVELQIKEAVRADHGKYIISAKNSSGHAQGFAIVNVLDRPGPCQNLKVTNVTKENCTISWENPLDNGGSEITNFIVEYRKPNQKGWSIVASDVTKRLIKANLLANNEYYFRVCAENKVGVGPTIETKTPILAINPIDRPGEPENLHIADKGKTFVYLKWRRPDYDGGSPNLSYHVERRLKGAADWERVHKGSIKETHYMVDKCVENQIYEFRVQTKNEGGESDWVKTEEVVVKEDLQKPVLDLKLSGVLTVKAGDTIRLEAGVRGKPFPEVSWTKDKDATDLTRSPRVKIDTSGDSSKFSLTKAKRSDGGKYVVTATNTAGSFVAFATVNVLDKPGPIRNLKITDVCSDRCSLRWDPPEDDGGCEIQNYILEKCESKRMVWSTFSSTILTPGTTVTRLIEGNEYIFRVRAENKIGTGPPTETKPVIAKTKYDKPGRPDPPEVTKVSKEEMTVVWAPPEYDGGKSITGYYLEKKEKHSTRWVPVNKSAIPERRLKVQNLLPGHEYQFRVKAENEVGIGEPSLPSRPVVAKDPIEPPGPPTNLKVVDTTKSSITLGWGKPVYDGGAPIIGYVVEMRPKKADMSPDEGWKRCNAAAQLVRMEFTVTSLDENQEYEFRVCAQNQVGIGRPAELKDAIKPKEILEPPEIDLDASMRKLVTVRAGCPIRLFAIVRGRPAPKVTWRKVGIDNVVRKGQVDLVDTMAFLVIPNSTRDDSGKYSLTLVNPAGEKAVFVNVRVLDTPGPVSDLKVSDVTKTSCHISWAPPENDGGSQVTHYIVEKREAERKTWATVTPEVKKTSFHVTNLVPGTEYFFRVTAVNEYGPGVPTDVPKPVLATDPLSEPDPPRKLEVTEMTKNSAVLAWLPPLRDGGAKIDGYIVSYREEEQPADRWTEYSVVKDLSLVVTGLKEGKKYKFRVAARNAVGVSLPREAEGVYEAKEQLLPPKILMPEQITIKAGKKLRIEAHVYGKPNPVCKWKKGEDDVVTSSHLAVHKAENSSVLIIKDVTRKDSGYYSLTAENSSGTDTQKIKVIVMDAPGPPQPPFDISDIDADACSLSWHIPLEDGGSNITNYIVEKCDVSRGDWVTALASVTKTSCRVGKLIPGQEYIFRVRAENRFGISEPLTSPKMVAKFPFGVPSEPKNARVTKVNKDCIFVAWDRPDSDGGSPITGYLIERKERNSLLWVKANDTPVRSTEYPCAGLVEGLEYSFRIYALNKAGSSPPSKPTEYVTARTPVDPPGKPEVIDVSKSTVSLVWARPKHDGGSKIIGYFVEACKLPGDQWIRCNTSPHQIPQEEFTVTGLEENAQYQFRAIAKTAVNISQPSEPSDPVTIMAESVPPRIELSVAMKSLLTVKAGTNVCLDATVFGKPKPTVSWKKDGTLLKPSEGIKMAMKRNLCTLELFSVTRKDSGDYTITAENPSGSKSATIKLKVLDKPGPPASVKINKMYSDRAMLSWEPPLEDGGSEITNYIVDKRETSRPNWAQVSATVPITSCSVEKLIEGHEYQFRICAENKYGVGDPILTEPAIAKNPYDPPGRCDPPVISNVTKDHMTVSWKPPADDGGSPITGYLVEKRETHAVNWTKVNRKPVIERTIKATGLQEGTEYEFRVIAINKAGPGKPSDASKAVYAQDPLYPPGPPAFPKVYDTTRSSVSLTWGKPAYDGGSPIIGYLVEVKRADSDNWVRCNLPQKLQKTRFEVTGLMENTEYQFRVYAVNKIGYSDPSDVPDKHCPKDILIPPEGELDADLRKTLILRAGVTMRLYVPVKGRPPPKITWSKPNVNLRERVGLDIKSTDFDTFLRCEKVNKYDAGKYILTLENSCGKKEYTIVVKVLDTPGPPVNVTVKEISKDSAYITWDPPIIDGGSPIINYVVEKRDAERKSWSTVTTECSKTSFRVSNLEEGKSYFFRVFAENEYGIGDPGETRDAVKASETPGPVVDLKVTSVTKSSCSIGWKKPRSDGGSRIIGYVVDFLTEENKWQRVMKSLSLQYTTKDLTEGKEYTFRVSAENENGEGTPSEITAVAKDDVVAPDLDLKDLPDLCYLAKENSNFRLKIPIKGKPVPSVSWKKGEDPLATDTRVSVESSAVNTTLVVYDCRKSDAGKYTITLKNVAGTKEGTLTIKVVGKPGIPTGPIKFEEVTAEAVTLKWGPPKDDGGSEITNYILEKRDSVNNKWVTCASAVQKTTFRVMRLHEGMEYTFRVSAENKYGVGEGLKSEPIVARHPFDVPDAPPPPNIVDVRHDSVSLTWTDPRKTGGSPITGYHIEFKERNSLLWKRANKTPIRMKDFKVTGLTEGLEYEFRVMAINLAGVGKPSLPSEPVVALDPIDPPGKPEVISVTRNSVTLVWTEPKYDGGHKLTGYIVEKRELPSKSWTKANHVNVPDCAFTVTDLVEGGKYEFRVRAKNTAGAISAPSESTDTIICKDEYEAPTIVLDPTIKDGLTVKAGDTIILSAISILGKPLPKSSWSKAGKDIRPSDIVQITSTPTSSMIAVKYATRKDAGEYTITATNPFGTKSEHVKVTVLDVPGPPGPIEISNVSAEKATLTWTPPLEDGGSPIKSYVLEKRETSRLLWTVVAEDIQSCRHVATKLIQGNEYVFRVSAVNQYGKGEPVQSEPVKMVDRFGPPGPPGKPEVSNVTKNTATVSWKRPVDDGGSEITGYHVERREKKSLRWVRATKTPVSDLRCKVTGLQEGNTYEFRVSAENKAGIGPPSDASNPVLMKDVAYPPGPPSNARVTDTTKKSASLAWGKPHYDGGLEITGYVVEHQKVGDEGWIKDTTGTALRITEFVVPDLETKEKYNFRISAINDAGVGEPAVIPNVEIVEREMAPDFELDAELRRTLVVRAGLSIRIFVPIKGRPAPEVTWTKDNINLKNRANIENTESFTLLIIPECNRYDTGKFVMTIENPAGKKSGFVNVRVLDTPGPVLNLRPTDITKESVTLHWDLPLIDGGSRITNYIVEKREATRKSYSTVTTKCHKCTYKVTGLSEGCEYFFRVMAENEYGIGEPAETTEPVRASEAPSPPDSLNIMDITKSTVSLAWPKPKHDGGSKITGYVIEAQRKGSDQWTHITTVKGLECVVKNLTEGEEYTFQVMAVNSAGRSAPRESRPVIVKEQTMLPELDLRGIYQKLVIAKAGDNIKVEIPVLGRPKPTVTWKKGDQILKQTQRVNFENTATSTILNINECVRSDSGPYPLTARNIVGEVGDVITIQVHDIPGPPTGPIKFDEVSSDFVTFSWEPPENDGGVPISNYVVEMRQTDSTTWVELATTVIRTTYKATRLTTGVEYQFRVKAQNRYGVGPSITSAPVVANYPFKVPGPPGTPQVAAVTKDSITISWHEPLSDGGSPILGYHVERKERNGILWQTVSKALVPGNIFKSSGLTDGIAYEFRVIAENMAGKGKPSKPSEPILALDPIDPPGKPVPLNITRHTVTLKWAKPEYTGGFKITSYIVEKRDLPNGRWLKANFSNILENEFTVSGLTEDAAYEFRVIAKNAAGAISPPSEPSDAITCRDDIEAPRIMVDVKFKDTITLKAGEAFKLEADVSGRPPPTMEWTKDGKELENTAKLEIKIADFSTNLVNKDSLRRDGGAYTLTATNPGGFAKHIFHVKVLDRPGPPEGPLAVSEVTSEKCVLSWLPPLDDGGAKIEYYVVQKRETSRLAWTNVASEVQVTKLKVTKLLKSNEYIFRVMAVNKYGVGEPLDSEPVLAVDPYGPPDPPKNPEVTSITKDSMVVCWGHPDSDGGSEIINYIVERRDKAGQRWVKCNKKTLTDLRYKVSGLTEGHEYEFRVMAENRAGISAPSATSPFYKACDAVFKPGPPGNPRVLDTSRSSISIAWNKPIYDGGSEITGYMVEIALPEEDEWKIVTPPSGLKATSYTITNLTENQEYKIRIYAMNSEGIGEPALVPGTPKAEDRMLPPEIELDAELRKVVTIRACCTLRLFVPIKGRPAPEVKWTREHGESLDKASIESTSSYTLLIIGNVNRFDSGKYILTIENSSGSKSAFVNVRVLDTPGPPQDLKVKEVTKTSVTLTWEPPLIDGGSKINNYIVEKRESTRKAYSTVTTNCHKTSWKVDQLQEGCSYYFRVLAENEYGIGLPAETAESVKASERPLPPGKITLVDVTRNSVSLSWEKPEHDGGSRILGYIVEMQSKGSDKWVTCATVKVTEATITGLIQGEEYSFRVSAQNEKGISDPRQLSVPVIAKDLVIPPAFKLLFTTFTVLAGEDLKVDVPFTGRPTPAVTWHKDDVPLKQTTRVNAESTENNSLLTIKEACREDVGHYIVKLTNSAGEATETLNVIVLDKPGPPTGPVKMEEVTADSVTFSWGPPKYDGGSSINNYIVEKRDTSTTTWQIVSATVARTTIKACRLKTGCEYQFRIAAENRYGKSTYLTSEPVVAQYPFKVPGPPGTPFVTLSSKDSMEVHWNEPVSDGGSKVIGYHLERKERNSILWVKLNKTPIPQTKFKTTGLDEGIEYEFRVSAENIVGIGKPSKVSESYVARDPCDPPGRPEPIIVTRNSVTLQWKKPAYDGGSKITGYIVEKKELPDGRWMKASFTNVIDTQFEVTGLVEDHRYEFRVIARNAAGVFSEPSESTGAITARDEVEPPQIRMDPKYKDTIVVHAGELFKIDADIHGKPIPTTQWIKGDHELSNTARLEIKSTDFATSLSVKDAIRIDSGSYILKAKNVAGEKSVTVNVKVLDRPGPPEGPIVISGVTAEKCTLAWKPPLQDGGSDIINYIVERRETSRLVWTVVDANVQTLGCKVTKLLEGNEYIFRVMAVNKYGVGEPLESEPVTAKNPFVVPDAPKAPEITAVTKDSMIVVWERPAFDGGSEILGYVLEKRDKEGIRWTRCHKRLIGELRLRVTGLLENHNYEFRVSAENAAGLSEPSPPSAYQKACDPIYKPGPPNNPRVTDITRSSVFLSWGKPIYDGGCEIQGYIVEKCDTSVGEWTMCTPPTGINKTNIEVEKLLEKHEYNFRICAVNKAGVGEHADVPGPVIVEEKLEAPDIDLDLELRKILNIRAGGSLRLFVPIRGRPTPEVKWGKVDGEIRDAAIIDSTSSFTSLVLDNVNRYDSGKYTLTLENSSGTKSAFVTVRVLDTPSPPVNLKVTEITKDSVSITWEPPLLDGGSKIKNYIVEKREATRKSYAAVVTNCHKNSWKIDQLQEGCSYYFRVTAENEYGIGLPAHTDDPVKVAEVPQPPGKITVDDVTRNSVSLSWTKPEHDGGSKIIQYIVEMQAKHSEKWSECARVKSLEAVITNLTQGEEYLFRVVAVNEKGRSDPRSLAVPIVAKDLVIEPDVRPAFNSYSVQVGQDLKIEVPISGRPKPTITWTKDDLPLKQTTRINVTDSLDLTVLSIKETHKDDGGHYGITVANVVGQKTASIEIITLDKPDPPKGPVKFDEVSAESITLSWEPPLYTGGCQITNYVVQKRDTTTTVWEVVSATVARTTLKVTKLKTGTEYQFRIFAENRYGQSFALESEPIVAQYPYKEPGPPGTPFVTAVSKDSMVVQWHEPINNGGSPVIGYHLEKKERNSILWTKVNKTIIHDTQFKAVNLEEGIEYEFRVYAENIVGIGKASKNSECYVARDPCDPPGTPEAIIVKRHEITLQWTKPAYDGGSVITGYIVEKRDLPEGRWMKASFTNVIETQFTVSGLTEDQRYEFRVIAKNAAGAVSKPSDSTGPITARDEVELPRISMDPKFRDTIVVNAGETFRLEADVHGKPLPTIEWLRGDKEIEESARYEIKNTDFKALLIVKDAIRIDGGQYILRASNVAGSKSFPVNVKVLDRPGPPEGPVQVTGVTAEKCTLTWSPPLQDGGSDISHYVVEKRETSRLAWTVVASEVVTNSLKVTKLLEGNEYIFRIMAVNKYGAGEPLESAPVLMKNPFVLPGPPKSLEVTNIAKDSMTVCWNRPDSDGGSEIIGYIVEKRDRSGIRWIKCNKRRITDLRLRVTGLTEDHEYEFRVSAENAAGVGEPSPATLYYKACDPVFKPGPPINAHVVDTTKNSITLAWGKPIYDGGSEILGYVVEICKADEEEWQIVTPQTGLKATRFEISKLTEHQEYKVRVCALNKVGLGEATAVPGTVKPEDKLEAPELDLDSELRKGIVVRAGGSVRIHIPFKGRPTPEITWSREEGEFTDKVQIEKAANYTQLSIDNCDRNDAGKYVLKLENSSGSKSAFVTVKVLDTPGPPQNLAVKEVRKDSVLLVWDPPLIDGGAKVKNYVIDKRESTRKAYANVSNKCSKTSLKVENLTEGAIYYFRVMAENEFGIGVPVETVDAVKASEPPSPPGKVTLTDVSQTSASLMWEKPEHDGGSRILGYVVEMQPKGTEKWSVVAESKVCSAVVTGLSSGQEYHFRVKAYNEKGQSDPRVLGVPVIAKDLTIQPSFKLPFNTYSVQAGEDLKIEIPVIGRPRPEISWVKDGEPLKQTTRVNVEKTATSTILHIKESNKDDFGKYTVTATNSAGTATENLSIIILEKPGPPVGPVRFDEVSADFVVISWEPPAYTGGCQISNYIVEKRDTTTTTWHMVSATVARTTIKITKLKMGSEYQFRIFAENRYGKSAPLDSKPVIVQYPFKEPGPPGTPFVTSVSKDQMLVQWHEPVNDGGSKVIGYHLEQKEKNSILWVKLNKTPIQDTKFKTTGLDEGLEYEFRVSAENIVGIGKASKVSECFVARDPCDPPGRPEAIVITRNNVTLKWKKPAYDGGSKITGYIVEKKDLPDGRWMKASFTNVLDTEFTVSGLVEDQRYEFRVIARNAAGNFSEPSESTGAITARDEIDAPNASLDPKYKDVIVVHAGETFVLEADIRGKPIPDIVWSKDGRELEETAARMEIKSTIQRTTLVVKDCIRSDGGQYILKLSNVGGTKTIPITVKVLDRPGPPEGPLKVSGVTAEKCYLAWNPPLQDGGASISHYIIEKRETSRLSWTQVSTEVQALNYKVTKLLPGNEYIFRVMAVNKYGTGDPLESEPVIARNPYKPPGPPSPPEVSAITKDSMVVTWARPVDDGGAEIEGYILEKRDKEGVRWTKCNKKTLTDLRFRVTGLTEGHSYEFRVAAENAAGVGEPSEPSVFSRACDALYPPGPPSNPKVTDTSRSSVSLAWNKPIYDGGAPVKGYVVEVKEATADEWTTCTPPTGLQGKQFTVTELKENTEYNFRICAINSEGVGEPATIPGSVAAKERQEPPEIELDADLRKVVILRASATLRLFVTIKGRPEPEVKWEKAEGVLTDRAQIEVTSSYTMLVIDNVTRFDSGRYNLTLENNSGSKTAFVNVRVLDSPSAPVNLTVREVKKDSVILAWEPPLIDGGAKITNYIVEKRETTRKAYATVTNNCTKNSFKIENLQEGCSYYFRVLASNEYGIGLPAETTEPVKASEPPLPPGRVTLVDVTRNTATIKWEKPESDGGSKITGYVVEMQTKGSEKWSICTQVKTLEATISGLTAGEEYIFRVAAINEKGKSDPRQLGVPVIARDIEIKPSVELPFNTFNVKARDQLKIDIPFKGRPQATVSWKKDGQTLKETTRVNVSSSKTVTSLIIKEASREDVGTYELCVSNSAGSVTVPITVIVLDKPGPPGPIHIDEVSCDNITISWNPPEYDGGCQISNYIVEKRETTSTTWHVVSQAVARTSIKIVRLVTGSEYQFRVCAENRFGKSSYSESSAVVAEYPFSPPGPPGTPKVVHATKSTMLVTWQVPVNDGGSRVLGYHLEYKERSSILWSKANKTLIADTQMKVSGLDEGLMYEYHVYAENIAGIGKCSKSCEPVPARDPCDPPGQPEVTNITRKSVSLKWSKPHYDGGAKITGYIIERRELPDGRWLKCNFTNVPETYFEVTELTEDQRYEFRVFARNAADSISEPSESTGPITVKDDVEAPRIMMDVKFRDVIVVKAGEVLKINADVAGRPLPIISWAKDGVEIEERARTEIVSTDYTTLLTVKDCVRRDSGQYVLTVKNVAGTRSMAVNCKVLDKPGPPAGPLEITGLTAEKCSLSWGPPQEDGGAAIDYYIVEKRETSRLAWTICEGELRTTFCKVTKLLKGNEYIFRVTGVNKYGVGEPLESMAVKALDPFTVPSPPTSLEITSVTKEFMTLCWSRPESDGGSEISGYIVERREKNSLRWVRVNKKPVYDLRVKSTGLREGCEYEYRVYAENAAGLSLPSESSPLIRAEDPVFLPSPPSKPNVMDSGKTNITIGWVKPLFDGGAPITGYTVEFKKSDETDWQTAIQNLRGTEYTVSGLTTGAEYVFRVRSINKVGASDPSDSSDPQIAKEREEEPVFDLDTEMRKTLIVKAGASFTMTVPFRGRPVPSVSWSKPDTDLRTRAYIDSTESRTSLTIENANRNDSGKYTLMIQNVLNAASLTLVVKVLDSPGPPANITVHDVTKESAVLSWDVPENDGGAPVKNYHIEKREASKKAWVSVTNNCNRLSYKITNLQEGAIYYFRVSGENEFGVGVPAETKEGVKITEKPSPPEKLGVTSVSRDSVSLAWLKPEHDGGSRIVHYVIEALEKGQTTWMRCAVVKSTHHVVSGLRQNSEYFFRVFAENQAGLSDPRELLLPVLIKEQLEPPEIDMKNFPSHTVYVRAGSNLKVDIPISGKPLPKVTLSRDGVPLKATMRFNTEITAENLTINLKESVAADAGRYEITAANSSGTTKAFINIVVLDRPGPPTGPVVISDITEDSVTLKWEPPKYDGGSQVTNYIVLKRETSTAVWTEVSATVARTMIKVMKLTTGEEYQFRIKAENRFGISDHIDSACVVVKLPYTTPGPPSTPWVTNVTRESITVGWHEPVSNGGSPVTGYHLEMKDRNSILWQKANKMVIRTTHFKVTTISAGLIYEFRVYAENAAGIGKPSHPSEPVLAIDACEPPRNVRITDISKNSVNLSWQQPAFDGGSKITGYMVERRDLPDGRWAKASFTNVTETHFTVSGLTQNAQYEFRVFARNAVGSISNPSEVVGPITCIDSYGGPVIDLPLEYTEVVKYRAGTSVKLRAGISGKPEPTIEWYKDDKELQTNALVCVENTTDLASILIKDATRLNSGTYELKLRNALGSASATIRLQILDKPGPPGGPIEFKTVTAEKITLLWQPPADDGGAKITHYIVEKRETSRVVWSMVSENLEECIIKTTKIIKGNEYIFRVRAVNKYGIGDALESHPVIARNAFVTPGPPSVPEVTKINKNSMTVVWSRPVADGGSDISGYILEKRDKKSLGWFKVLKETIRDTRQKVTGLTEHSDYQYRVCAVNAAGQGPFSEPSDFYKAADPIDPPGPPAKIRIADSTKSSITLGWSKPVYDGGSAVTGYVVAMRQGEEEEWTVVSTKGEVRTTEYVVSNLSPGVNYYFQVSAVNCAGQGEPIAMTEPVQAKDILEEPEIDLDVAFRTSIIAKAGEDVHALVPFKGRPPPTVTWRKDEKNLGSDARYSIQNTDSSSILTIPQVTRHDTGKYILTIENGVGQPKSSTVSVKVLDTPAACQNLQVKHVSQGTVTLFWDPPLIDGGSPIINYIIEKKDATKRTWSSVSHKCSSTSFKVTDLSEKTPFFFRVFAVNEIGIGEPCETTEPVKAAEVPAPIRDLSVKDSTKTSVTLSWTKPDFDGGSVITDYIVERKGKGEQTWSHAGISKTCEIEVGKLKELSELEFRVSARNEKGLSDSVSIGPVTVKELVIPPEVDLSEIPGAQVAVRIGHNVHLELPYKGKPKPSISWLKDGLPLKESELVRLGKTENKLTLSIKNAKKENGGKYTIILDNAVCRNTYPITVITLGPPSKPKGPIRFDEIKADSVIMSWDVPDDDGGGEITCYSIEKREASQTNWKMVCSSVARTTFKVPNLVKDAEYQFRVRAENRYGVSQPLVSNIILAKHQFRIPGPPGKPVTYNVTSDGMSLTWDAPVYDGGSEVTGYHVEKKERNSILWQRINMSPISGREYRATGLMEGLDYQFRVFAENSAGLSSPSDPSKFTLAVSPVDPPGTPDYIDVTRETITLKWNPPLRDGGSKIVAYSIEKRQGSDRWTRCNFTDVSECQYTVTGLSPGDRYEFRIIARNAVGTISPPSQSSGVIMTRDENVAPTVEFGPEYFDGITIKSGESLRIKALVQGRPVPRVTWFKDGVEIEKKMNMEITDVLGSTSLFVRDATRDHRGVYRVEAKNASGSTKAEITVRVQDTPGKPVGPIRFTNITGEKMTLWWDAPHNDGCAPVSHYLIEKRETSRLAWALIEDNCEALSYTATKLITGNEYQFRISAVNKFGVSRPLDSDPVVAQIQYTIPDAPGTPEPSNVTGNSITLTWARPESDGGSEIQQYILERREKKSTRWVKVISKRPICETRFKVTGLTEGNEYEFHVMAENAAGVGPASGVSRLIKCREPVNPPGAPTVVKVTDTSKTTVSLEWSKPVFDGGLEIIGYIIEMCKADLGDWHKVNVEACVKTRYTVTDLQAGEEYKFRVSAINAAGKGDSCEVTGTIKAVDRLSAPELDIDANFKQTHVVRAGASIRLFIAYQGRPTPTAVWSKPDSNLSIRADIHTTDSFSTLTVENCNRTDAGKYTLTVENNSGSKSITFTVKVLDSPGPPGPITFKDVTRGSATLMWDAPLLDGGARIHHYVVEKREASRRSWQVVSEKCIRQILRVSDLLEGVPYYFRVSAENEYGVGEPYEMPEPMVATEQPAPPRRLDIVDTSKSSVVLAWLKPDHDGGSRITGYLLEMRQKGSDFWVEAGHTKQMTFTVERLVENTEYEFRVKAKNDAGYSEPREAFSSVIIKEPQIEPTADLTGITNQLITCKAGSTFTIDVPISGRPAPKVTWKLEEMRLKETDRVSITTTKDRTTLSVKDSMRGDSGRYFLTLENTAGVKTFTITVVVIGRPGPVTGPIEVSSISAESCVLSWAEPQDNGGTDITNYIVEKRESGTTAWQLVNSSVKRTQIKVTHLTKYMEYSFRVSSENRFGVSKPVESAPIVAEHPFVPPSAPTRPEVYYVSANAMSIRWEEPYHDGGSKVIGYWVEKKERNTILWVKENKVPCLECNYKVTGLVEGLEYQFRTYALNAAGVSKASEASRPVMAQNPVDAPGRPEVTDVTRSTVSLIWSAPVYDGGSKVVGYIIERKPVSEVGDGRWLKCNYTIVSDNFFTVTALSEGDTYEFRVLAKNAAGVISKGSESTGPITCRDEYAPPKAELDARLQGDLVTIRAGSDLVLDAAVGGKPEPKIIWTKGDKELDMCEKISLQYTGKRATAVIKFCDRSDSGKYTLTVKNASGTKAVSVLVKVLDSPGPCGKLTVSRVTEEKCTLAWSLPQEDGGAEITHYIVERRETSRLNWVIVEGECPTLSHVVTRLIKNNEYIFRVRAVNKYGPGVPVESEPIVARNSFTIPSQPGIPEEVGAGKEHIIIQWTKPESDGGNDISNYLVDKREKKSLRWTRVNKDHVVYDTRLKVTGLMEGCDYQFRVTAVNAAGNSEPSEASNFISCREPSYTPGPPSAPRVVDTTKHSISLAWTKPMYDGGTDIIGYVLEMQEKDTDQWYRVHTNATIRNNEFTVTDLKMGQKYSFRVAAVNVKGMSEYSESTAEIEPVERLEIPDLELADDLKKTVTIRAGASLRLMVSVSGRPPPVITWSKKGIDLASRAIIDTTESYSLLIVDKVNRYDAGKYTIEAENQSGKKSATVLVKVYDTPGPCPSVKVKEVSRDSVTITWEVPTIDGGAPVNNYIIEKREAAMRAFKTVTTKCSKTLYRISGLIEGAMYYFRVLPENIYGIGEPCETSDAVLVSEVPLVPTKLEVVDVTKSTVTLAWEKPLYDGGSRLTGYVLEACRAGTERWMKVVTLKPTVLEHTVISLNEGEQYLFRVRAQNEKGVSEPREIVTAVTVQDLRVLPTIDLSTMPQKTIHVPAGRPVELVIPIAGRPPPAASWFFAGSKLRESERVTVETHTKVAKLTIRETTIKDTGDYVLELKNVTGTTSETIKVIVLVDKPGPPSGPIKVDEIDATSVTISWGPPELDGGAPLSGYVVEQRDAHRPGWLPVSESVTRSTFKFTRLIEGNEYVFRVAATNRFGIGSYLQSEVIECRSSINIPGPPETLQIFDVSREGMTLTWYPPEDDGGSQVTGYIVERKEVRADRWVRVNKVPVTMTRYRSTGLIEGLEYEHRVTAVNVRGTGKPSRPSKPTVAMDPIAPPGKPQNPRVTDTTRTSVSLAWSVPEDEGGSKVTGYLIEMQKVDQHEWTKCNTTPTKIREYTLTHLPQGAEYRFRVLACNAGGPGEPAEVPGTVKVTEMLEYPDYELDERYQEGILVRQGGVIRLTIPIKGKPFPICKWTKEGQDISKRAMIATSETHTELVIKEADRDDSGTYDLILENKCGKKAVYIKVRVIGNPNTPEGPLEYDDIQARSVRVSWRPPADDGGADILGYILERREVPKSAWYTIDSRVRGTSLVVKGLKENVEYHFRVSAENQFGISKPLKSEEPVIPKTPLNPPEPPSNPPEILDVTKSSVSLSWSRPKDDGGSRVTGYYIERKETSTDKWVRHNKTQITTTMYTVTGLVPDAEYQFRIIAQNDVGLSETSPASEPVVCKDPFDKPSQPGELEILSISKDSVTLQWEKPECDGGKEILGYWVEYRQSGDSAWKKSSKDRIKDRQFTIGGLLEATEYEFRVFAENETGLSRPRRTAMSVKTKLTSGEAPGVRKEMKDVTTKLGEAAQLSCQIVGRPLPDIKWFRFGKELVQSRKYKMSSDGRTHTLTVMTEEQEDEGVYTCVATNEVGEVESSSKLLLQATPQFHPGYPLKEKYYGAVGSTLRIHVMYIGRPVPAITWFRGQKLLQNSENITIENTEHYTHLVMKNVQRKTHAGKYKVQLSNVLGTVDTMLDVEIQDKPDKPTGPIVIEALLKNSVVISWKPPADDGGSWITNYVVEKCEAKEGAEWQLVSSAISVTTCRIVNLTENAGYYFRVSAQNMFGISEPLEVSSVVIIKSPFEKPGAPGKPTITAVTKDSCVVAWKPPASDGGAKIRNYYLEKREKKQNKWIAVTTDEIRETVFSVQNLIEGLEYEFRVKCENLGGESEWSEISEPVTPKSDVPIQAPHFKEELRNLNVRYQSNATLVCKVTGHPKPIVKWYRQGKEIIADGLKYRIQEFKGGYHQLIIASVTDDDATVYQVRATNQGGSVSGTASLEVEDTVPAKIHLPKNLEGMGAVHALRGEVISIKIPFSGKPDPVITWQKGQDLIDNNGHYQVIVTRSFTSLVFPNGVERKDAGFYVVCAKNRFGIDQKTVELDVADVPDPPRGVKVSDVSRDSVNLTWTEPASDGGSKVTNYIVEKCATTAERWIRVGQARETRYTVINLFGKTSYQFRIIAENKFGLSKPSEPSEPTVTKEDKTRAMNYDEEVDETREVSMTKASHSSTKELYEKYMIAEDLGRGQFGIVHRCVETSSKKTYMAKFVKVKGTDQVLVKKEISILNIARHRNMLYLHESFESMEELVMIFEFISGLDIFERINTSAFELNEREIVSYVRQVCEALEFLHSHNIGHFDIRPDNIIYQTRRSSTIKIIEFGQARQLKPGDNFRLQFTAPEYYAPEVHQHDVVSTATDMWSLGTLVYVLLSGINPFLAETNQQIIENIMNAEYTFDEEAFQEISLEAMDFVDRLLVKERKSRMTASEALQHPWLKQKTERVSTKVIRTLKHRRYYHTLVKKDLNMVVSAARISCGGAIRSQKGVSIAKVKVASIEIGPVSGQIMHAVGEEGGYVKYVCRIENYDQSTQVTWYFGVRQLENSEKYEITYEDGVATMYVKDITKFDDGTYRCKVVNDYGEDSSYAELFVKGVREVYDYYCRRTVKKLKRRTDAMRLLERPPEFTLPLYNKTAYVGENVRFGVTITVHPEPRVTWYKSGQKIKPGDDDRKYIFESDKGLYQLTINSVTMDDDAEYTVVARNKYGEDSCKAKLTVTPHPPPSDTTLRPMFKRLLANAECQEGQSVCFEIRVSGIP

SEQ ID NO: 65 - protein, 265 aa, Gallus gallus
MSEAEEEYEEEQPEEEEEAAAAAEEEEEEEAEASKPHEEPEEERPRPRPVVPQLAPPKIPEGERVDFDDIHRKRMEKDLLELQTLIDAHFEQRRREENELVALMERIERRRAERNEQLRSRTEKERERQARLAEEKLRKEEEEAKKRAEDDAKKKKVLSNMPHFGGYLAKAEQRRGKRQTGREMKLRILAERKKPLHIEHMREDELRAKAKELHDWIQQLESEKFDLMEKLRRQKYEINVLYNRISHAQKFKKVVGKGRVGGRWK

SEQ ID NO: 66 - protein, 265 aa, Gallus gallus; identical to SEQ ID NO: 65

SEQ ID NO: 67 - protein, 188 aa, Gallus gallus
MPEPRERKSKITASRKLLLKSLMLAKAKEEWEQEIVDKQSEKERYLSERITPLHTSGLSLSQLQDLCRELHEKVEIVDEERYDIEAKCNHNTREIKDLKLKVLDLRGKFKRPPLRRVRVSADAMLRALLGSKHKVSMDLRANLKSVKKEDTEKERPVEVGDWRKNVEAMSGMEGRKKMFDAAKSPTGQ

SEQ ID NO: 68 - protein, 181 aa, Gallus gallus
LPIHTSTVCLCPQSLMLAKAKEEWEQEIVDKQSEKERYLSERITPLHTSGLSLSQLQDLCRELHEKVEIVDEERYDIEAKCNHNTREIKDLKLKVLDLRGKFKRPPLRRVRVSADAMLRALLGSKHKVSMDLRANLKSVKKEDTEKERPVEVGDWRKNVEAMSGMEGRKKMFDAAKSPTGQ

SEQ ID NO: 69 - protein, 160 aa, Sus scrofa; identical to SEQ ID NO: 9

SEQ ID NO: 70 - protein, 223 aa, Salmo salar
MSDTEEVEAQKPQFKVPKIPDGDKVDFDDIQKKRQNKDLIELQALIDAHFEHRKKEEEELIALKERIEKRRAERAEQNRIRSEKEKERAARREEERLKREEADAKKKADEDAKKKSALSSMGSNYSSHLQKADSKRGGKKETEREKKKKILAGRRKALNIDHLNEEKLKEKAKELHEWMQTLESEKFDHIERLKRQKYEVTTLRKRVEELSKFSKKGKTVRRK

SEQ ID NO: 71 - protein, 287 aa, Gallus gallus
MSDTEEVEHGEAHEAEEVHEEAHHEEAHHEEAHHEEAHHAEAHHAEAHHEEAHAHAEEVHEPAPPPEEKPRIKLTAPKIPEGEKVDFDDIQKKRQNKDLIELQALIDSHFEARRKEEEELVALKERIEKRRAERAEQQRIRAEKEKERQARLAEEKARREEEDAKRKAEDDLKKKKALSSMGASYSSYLAKADQKRGKKQTARETKKKVLAERRKPLNIDHLNEDKLRDKAKELWDWLYQLQTEKYDFAEQIKRKKYEILTLRCRLQELSKFSKKAGAKGKVGGRWK

SEQ ID NO: 72 - protein, 603 aa, Sus scrofa
MASAPTSKYNSHSLENESIKRTSRDGVNRDMGEAVPRLPGETPITDKEVIYICPFNGPIKGRVYITNYRLYLRSLETDSALILDVPLGVISRIEKMGGATSRGENSYGLDITCKDMRNLRFALKQEGHSRRDMFEILTRYAFPLAHSLPMFAFLNEEKFNVDGWTVYNPVEEYRRQGLPNHHWRITFINKCYELCDTYPALLVVPYRAADEDLRRVATFRSRNRIPVLSWIHPENKTVIVRCSQPLVGMSGKRNKDDEKYLDVIRETNRQVNKLTIYDARPNVNAVANKATGGGYESDDAYHNAELFFLDIHNIHVMRESLKKVKDIVYPNVEESHWLSSLESTHWLEHIKLVLTGAIQVADRVSSGKSSVVVHCSDGWDRTAQLTSLAMLMLDSFYRSIEGFEILVQKEWISFGHKFASRIGHGDKNHADADRSPIFLQFIDCVWQMSKQFPTAFEFNEHFLITILDHLYSCRFGTFLYNCESARERQKVTERTVSLWSLINSNKDKFKNPFYTKEINRVLYPVASMRHLELWVNYYIRWNPRIKQQQPNPVEQRYMELLALRDEYIKRLEELQLANSAKLSEPAAAPSSPSQMVSHVQTHF

SEQ ID NO: 73 - protein, 298 aa, Sus scrofa
MPLSGTPAPNKKRKSSKLIMELTGGGQESSGLNLGKKISVPRDVMLEELSLLTNRGSKMFKLRQMRVEKFIYENHPDVFSDSSMDHFQKFLPTVGGQLGTAGQGFSYSKGSSGGQAGGSSSAGQYGSGQQHHHQGSGSGSGGAGGPGSQTGRGGDAGTTGVGETGTGDQAGGEGKHITVFKTYISPWEKAMGVDPHQKVELGIDLLAYGAKAELPQYKSFNRTAMPYGGYEKASKRMTFQMPKFDLGPLLSEPLVLYNQNLSNRPSFNRTPIPWLSSGEPVDYNVDIGIPLDGETEEL

SEQ ID NO: 74 - protein, 293 aa, Meleagris gallopavo; identical to SEQ ID NO: 7

SEQ ID NO: 75 - protein, 901 aa, Bos taurus
MMMVLQPEGLGTGEGPFAGGRGGGEYMEQEEDWDRDLLLDPAWEKQQRKTFTAWCNSHLRKAGTQIENIEEDFRNGLKLMLLLEVISGERLPRPDKGKMRFHKIANVNKALDFIASKGVKLVSIGAEEIVDGNLKMTLGMIWTIILRFAIQDISVEETSAKEGLLLWCQRKTAPYRNVNVQNFHTSWKDGLALCALIHRHRPDLIDYAKLRKDDPIGNLNTAFEVAEKYLDIPKMLDAEDIVNTPKPDEKAIMTYVSCFYHAFAGAEQAETAANRICKVLAVNQENEKLMEEYEKLASELLEWIRRTVPWLENRVGEPSMSAMQRKLEDFRDYRRLHKPPRVQEKCQLEINFNTLQTKLRLSHRPAFMPSEGKLVSDIANAWRGLEQAEKGYEDWLLSEIRRLQRLQHLAEKFQQKASLHEAWTRGKEDMLSQRDYETASLQEVRALLRRHEAFESDLAAHQDRVEHIAALAQELNELDYHEAASVNSRCQAICDQWDNLGTLTQKRRDALERMEKLLETIDQLQLEFARRAAPFNNWLDGAVEDLQDVWLVHSVEETQSLVTAHDQFKATLPEADRERGAILGIQGEIQKICQTYGLRPSSTNPYITLTPQDINTKWDTVRKLVPSRDQMLQEELTRQQVNERLRRQFAAQANAIGPWIQGKVEEVGRLAAGMAGSLEEQMAGLRQQEQNIINYKSNIDRLEGDHQLLQESLVFDNKHTVYSMEHIRVGWEQLLTSIARTINEVENQVLTRDAKGLSQEQLNEFRASFNHFDRKRNGMMEPDDFRACLISMGYDLGEVEFARIMTMVDPNAAGVVTFQAFIDFMTRETAETDTAEQVVASFKILAGDKNYITAEELRRELPAEQAEYCIRRMAPYKGAGAPAGALDYVAFSSALYGESDL

SEQ ID NO: 76 - protein, 901 aa, Bos taurus
MMMVLQPEGLGTGEGPFAGGRGGGEYMEQEEDWDRDLLLDPAWEKQQRKTFTAWCNSHLRKAGTQIENIEEDFRNGLKLMLLLEVISGERLPRPDKGKMRFHKIANVNKALDFIASKGVKLVSIGAEGEEVAGGGRWGWGRGTTICTSQEQLIYQVETSAKEGLLLWCQRKTAPYRNVNVQNFHTSWKDGLALCALIHRHRPDLIDYAKLRKDDPIGNLNTAFEVAEKYLDIPKMLDAEDIVNTPKPDEKAIMTYVSCFYHAFAGAEQAETAANRICKVLAVNQENEKLMEEYEKLASELLEWIRRTVPWLENRVGEPSMSAMQRKLEDFRDYRRLHKPPRVQEKCQLEINFNTLQTKLRLSHRPAFMPSEGKLVSDIANAWRGLEQAEKGYEDWLLSEIRRLQRLQHLAEKFQQKASLHEAWTRGKEDMLSQRDYETASLQEVRALLRRHEAFESDLAAHQDRVEHIAALAQELNELDYHEAASVNSRCQAICDQWDNLGTLTQKRRDALERMEKLLETIDQLQLEFARRAAPFNNWLDGAVEDLQDVWLVHSVEETQSLVTAHDQFKATLPEADRERGAILGIQGEIQKICQTYGLRPSSTNPYITLTPQDINTKWDTVRKLVPSRDQMLQEELTRQQVNERLRRQFAAQANAIGPWIQGKVEEVGRLAAGMAGSLEEQMAGLRQQEQNIINYKSNIDRLEGDHQLLQESLVFDNKHTVYSMEHIRVGWEQLLTSIARTINEVENQVLTRDAKGLSQEQLNEFRASFNHFDRKRNGMMEPDDFRACLISMGYDLGEVEFARIMTMVDPNAAGVVTFQAFIDFMTRETAETDTAEQVVASFKILAGDKNYITAEELRRELPAEQAEYCIRRMAPYKGAGAPAGALDYVAFSSALYGESDL

SEQ ID NO: 77 - protein, 894 aa, Bos taurus
MNQIEPGVQYNYVYEDDEYMIQEEEWDRDLLLDPAWEKQQRKTFTAWCNSHLRKAGTQIENIEEDFRNGLKLMLLLEVISGERLPKPDRGKMRFHKIANVNKALDYIASKGVKLVSIGAEEIVDGNVKMTLGMIWTIILRFAIQDISVEETSAKEGLLLWCQRKTAPYRNVNIQNFHTSWKDGLGLCALIHRHRPDLIDYSKLNKDDPIGNINLAMEIAEKHLDIPKMLDAEDIVNTPKPDERAIMTYVSCFYHAFAGAEQAETAANRICKVLAVNQENERLMEEYERLASELLEWIRRTIPWLENRTPEKTMQAMQKKLEDFRDYRRKHKPPKVQEKCQLEINFNTLQTKLRISNRPAFMPSEGKMVSDIAGAWQRLEQAEKGYEEWLLNEIRRLERVEHLAEKFRQKASTHETWAYGKEQILLQKDYESSTLTEVRALLRKHEAFESDLAAHQDRVEQIAAIAQELNELDYHDAVNVNDRCQKICDQWDRLGTLTQKRREALERTEKLLETIDQLHLEFAKRAAPFNNWMEGAMEDLQDMFIVHSIEEIQSLITAHEQFKATLPEADGERQSILAIQNEVEKVIQSYSIRISSSNPYSTVTVDEIRSKWDKVKQLVPIRDQSLQEELARQHANERLRRQFAAQANAIGPWIQNKMEEIARSSIQITGALEDQMNQLKQYEHNIINYKNNIDKLEGDHQLIQEALVFDNKHTNYTMEHIRVGWELLLTTIARTINEVETQILTRDAKGITQEQMNEFRASFNHFDRRKNGLMDHEDFRACLISMGYDLGEAEFARIMTLVDPNGQGTVTFQSFIDFMTRETADTDTAEQVIASFRILASDKPYILAEELRRELPPDQAQYCIKRMPAYSGPGSVPGALDYTAFSSALYGESDL

SEQ ID NO: 78 - protein, 1398 aa, Salmo salar
MATKVMHFNQKKHVSHVSHHSSHTTKHVVKEQSSRKSSSKSVNQVQHTHATEAMAEPAYTVPAFRQRSADEIEEYQRVSSHVGKGLASIQKELHRMRVVTKTQVENIAIKREVQEMMHKKMTLSTETDKAPDFMVALRPHTVWEKTPVKLFCTVDGHPRPIVKWYKGGKPVDPLSAPGKYKIESKYGVHSLIISRCMVSDTAEYSAVATNSHGSTTSKASVIVKRPAGGAYGSCQLFGQVPHLTVIHHSKLEITMLDRFGVSFGTEGGSISLVCTMVVVPDLPNVPPLAQWYRDDKLLKAGKLAEIKVGGGAATLTLPHLAKDDEGLYTLRMWTKDGTTEHSAYLFVKDAAPSVAGAPGAPISVKAFDINSDYVLVAWKPPNTTNEAAITGYFVDKRESGSATWSQCNDAPVQICKYPVHGLNVGHAYHFRVRAVNSAGISRPSRESDKVTALDPAERERLQVIKLDGKHEVVIKDDDLEGVPSAPGQVVATRNTKSSVFVQWDPPKHPNHLMGYYIDASLVGSKTWAPCNHKPYKNTRFVVHGLTPGETYVFRVQAVNVYGLSDESQESTPIAVEPALTTPSAPHGITMLSCDGASMIIAWNSPKHRGGSKINAYYVDKRDADSLAWKEVNSAPTNTRTYTVDGLTEGTFYEFKVQAGNLAGVGVPSAPSTPLKCEAWTSAVPGPAYDLAFREVRGDSLVILWKAPVYTGASAVTGYIVEMAKKGHHYHPLNEEAIGHCYLQVTGLEAGAEYTFKVKAVNAEGVGKASQTSEPVFAKALPGTQEIQCGVDEDTGDIFLSFEACEISETSNFAWSKNYKEISDCTRVSIETKGKHSKLTFVNPDVSDLGAFSVHVTDTDGVSASHTVTEDALNTMLELSYNIRHPIVPLKHQLNYEVLEKGHVRFWLQCLKMSPAVNYRFIVNDKEVTSSDSHKISHDVNTGVIQMTVDHFSKASEATYTVQIHDGRAKNQSSLVLVGDVFKAALKEAEFQRSEHIRKQGPHFAEYLSYHVDDDCTVLLVCKVANVKKETVFHWFKDEEEIVPETPPNVMSGSVALPISLFSRKDQGHYKAKLSDDRGKDTSVFDISGQVFDDIINAIAHIAGSSASELVLQCTPEGIRLQCYMKYYTEEIRTAWLHKDSKISSSEKMRIAGTAEMAWMQIREPSEKEKGHYSIQIMDATKSHTRTFDLSGQAYTDAYEEYLRLKAAAFAEKNRGRVVGGLPDVVTIMEQKTLSLTCTVWGDPSPEVTWFKNENEVVSTEHAKITLEANKFASLTITAVTSEDSGKYSINVRNKYGGEFVEITVSVYKQGESPPEPKMGGRGATPAPLASKTPAKTPTPAQTPTPSLKSPTPSLKSPTPSLRSPAKSPTPTPKSPTPPRRVKSPSPARSLKSPTPPRK

SEQ ID NO: 79 - protein, 284 aa, Gallus gallus
MEAIKKKMQMLKLDKENAIDRAEQAEADKKQAEDRCKQLEEEQQGLQKKLKGTEDEVEKYSESVKEAQEKLEQAEKKATDAEAEVASLNRRIQLVEEELDRAQERLATALQKLEEAEKAADESERGMKVIENRAMKDEEKMELQEMQLKEAKHIAEEADRKYEEVARKLVVLEGELERSEERAEVAESKCGDLEEELKIVTNNLKSLEAQADKYSTKEDKYEEEIKLLGEKLKEAETRAEFAERSVAKLEKTIDDLEDEVYAQKMKYKAISEELDNALNDITSL

SEQ ID NO: 80 - protein, 434 aa, Bos taurus
MAMQKIFAREILDSRGNPTVEVDLHTAKGRFRAAVPSGASTGIYEALELRDGDKSRYLGKGVLKAVEHINKTLGPALLEKKLSVVDQEKVDKFMIELDGTENKSKFGANAILGVSLAVCKAGAAEKGVPLYRHIADLAGNPELILPVPAFNVINGGSHAGNKLAMQEFMILPVGASSFREAMRIGAEVYHHLKGVIKAKYGKDATNVGDEGGFAPNILENNEALELLKTAIQAAGYPDKVVIGMDVAASEFYRNGKYDLDFKSPDDPARHISGEKLGELYKNFIKNYPVVSIEDPFDQDDWATWTSFLSGVNIQIVGDDLTVTNPKRIAQAVEKKACNCLLLKVNQIGSVTESIQACKLAQSNGWGVMVSHRSGETEDTFIADLVVGLCTGQIKTGAPCRSERLAKYNQLMRIEEALGDKAVFAGRKFRNPKAK

SEQ ID NO: 81 - protein, 245 aa, Sus scrofa
MIPKEQKGPVVTAMGDLTEPAPLLDLGKKLSVPQDLMVEELSLPNNRGSLLFQERQRRVQKFTFEFAGSQRASAAGTAQGTVTATATPGRAANSPEGQNYSSELHVSLESPGGPEDVQPAAPRAVSAPRPSALAPGYAEPLKGIPPEKFNHTAIPKGYRCPWQEFISYRDYLGEGRSHTPSLADYRNFNKTPVPFGGLLAGETLPRAGTPSVPELSSGLELLRLRPSFNRVAQGWVRNLPESEEL

SEQ ID NO: 82 - protein, 297 aa, Oryctolagus cuniculus
MPLSGTPAPNKKRKSSKLIMELTGGGQESSGLNLGKKISVPRDVMLEELSLLTNRGSKMFKLRQMRVEKFIYENHPDVFSDSSMDHFQKFLPTVGGQLGTAGQGVSYSKGSGGGQAGGSGSAGQYGSDHQHHHGSGSGAGGAGGPGGQAGKGGAAGAGGVGETGSGDQTGGDGKHITVFKTYISPWEQPWGVDPQQKVELGIDLLAYGAKAELPKYKSFNRTAMPYGGYEKASKRMTFQMPKFDLGPLLSEPLVLYNQNLSNRPSFNRTPIPWLSSGEHADYHVDIGIPLDGETEEL

SEQ ID NO: 83 - protein, 603 aa, Bos taurus
MASAPTSKYNSHSLENESIKRTSRDGVNRDVGETLPRLPGEIRITDKEVIYICPFNGPIKGRVYITNYRLYLRSLETDSALILDVPLGVISRIEKMGGATSRGENSYGLDITCKDLRNLRFALKQEGHSRRDMFEILTRYAFPLAHSLPIFAFLNEEKFNVDGWTVYNPVEEYRRQGLPNHHWRITFINKCYKLCDTYPALLVVPYRASDEDLRRVATFRSRNRIPVLSWIHPENKTVIVRCSQPLVGMSGKRNKEDERYLDVIRETNRQVNKLTIYDARPNVNAVANKATGGGYESDDVYHNAELFFLDIHNIHVMRESLKKVKDIVYPNVEESHWLSSLESTHWLEHIKLVLTGAIQVADRVSSGKSSVVVHCSDGWDRTAQLTSLAMLMLDSFYRSIEGFEILVQKEWISFGHKFASRIGHGDKNHADADRSPIFLQFIDCVWQMSKQFPTAFEFNERFLITILDHLYSCRFGTFLYNCESAREKQKVTERTVSLWSLINSNKDKFKNPFYTKEINRVLYPVASMRHLELWVNYYIRWNPRIKQQQPNPVEQRYMELLALRDEYIKRLDELQLANSAKLSDPSASPSSPSQMMPHVQTHF

SEQ ID NO: 84 - protein, 224 aa, Bos taurus
MELYETSPYFYQEPHFYDGENYLPVHLQGFEPPGYERAELSLSPEARVPLEDKGLGPAEHCPGQCLPWACKVCKRKSVSVDRRRAATLREKRRLKKVNEAFEALKRSTLLNPNQRLPKVEILRSAIQYIERLQALLSSLNQEERDLRYRGGGGPQAAVPSECSSHSASCSPQWGSALEFGPNPGDHLLPADPTDAHNLHSLTSIVDSITVEDVAAAFPDETIPN

SEQ ID NO: 85 - protein, 224 aa, Sus scrofa
MELYETSPYFYQEPHFYDGENYLPVHLQGFEPPGYERTELSLSPEARVPLEDKGLGTPEHCPGQCLPWACKVCKRKSVSVDRRRAATLREKRRLKKVNEAFEALKRSTLLNPNQRLPKVEILRSAIQYIERLQALLSSLNQEERDLRYRGGGGPQPGVPSECSSHSASCSPEWGSALEFGPNPGDHLLTADPTDAHNLHSLTSIVDSITVEDVAVAFPDETMPN

SEQ ID NO: 86 - protein, 2058 aa, Gallus gallus
MGGSGAAATLALGLALGLALGGWANCPERELQRREEEANVVLTGTVEEIMNVDPVHHTYSCKVRVWRYLKGKDIVTHEILLDGGNKVVIGGFGDPLICDNQVSTGDTRIFFVNPAPQYMWPAHRNELMLNSSLMRITLRNLEEVEHCVEEHRKLLADKPNSYFTQTPPTPRDACRGMLCGFGAVCERSPTDPSQASCVCKKTACPVVVAPVCGSDYSTYSNECELEKAQCNQQRRIKVISKGPCGSKDPCAEVTCSFGSTCVRSADGQTAGCVCPASCSGVAESIVCGSDGKDYRSECDLNKHACDKQENVFKKFDGACDPCKGILNDMNRVCRVNPRTRRVELLSRPENCPSKREPVCGDDGVTYASECVMGRTGAIRGLEIQKVRSGQCQHQDKCKDECKFNAVCLKRWHARCSCDRITCDGTYRPVCARDSRTYSNDCERQKAECHQKAAIPVKHSGPCDLGTPSPCLSVECTFGATCVVKNREPVCECQQVCQGRYDPVCGSDNRTYGNPCELNAMACVLKREIRVKHKGPCDRCGKCQFGAICEAETGRCVCPTECVPSSQPVCGTDGNTYGSECELHVRACTQQKNILVAAQGDCKSCGTTVCSFGSTCVGGQCVCPRCEQQPLAQVCGTDGLTYDNRCELRAASCQQQKSIEVAKMGPCEDECGSGGSGSGDGSECEQDRCRHYGGWWDEDAEDDRCVCDFTCLAVPRSPVCGSDDVTYANECELKKTRCEKRQNLYVTSQGACRALTTTPPPLPVVHCSQTIYGCCPDNMTLALGVGAAGCPSTCQCNPYGSYGGTCDPATGQCSCKPGVGGLKCDRCEPGFWNFRGIVTDSKSGCTPCNCDPVGSVRDDCEQMTGLCSCKTGITGMKCNQCPNGSKMGMAGCEKDPSAPKSCEEMSCEFGATCVEVNGFAHCECPSPLCSEANMTKVCGSDGVTYGDQCQLKTIACRQGQLITVKHVGQCHESITHTSHTMPPTPLPTLPLDKLIVPPPLQLTTQAPEPTELATTSLLMEASPTTRSHPTTRRVTTTRPVTTPWMTHGVLKTTVRPLSTSPVVLATTQPPYAESGSAEGSGDQEMSISGDQESSGAGSAGEEEVEESQVTPTPAIERATCYNTPLGCCSDGKTAAADAEGSNCPATKVFQGVLILEEVEGQELFYTPEMADPKSELFGETARSIESALDELFRNSDVKNDFKSIRVRDLGQSSAVRVIVESHFDPATSYTAADVQAASLKQIRASKKRTILVKKPQQEHVKFMDFDWIPRIFTTTITTTTATTMAPATTRRHTTASAATTAHILRQDTVGHPSAKLAAPASTRRPTSTLPTTARRKPTRQPPSTTKKPSRPCDSHPCLHGGTCEDDGREFTCRCPAGKGGAVCEKPIRYFIPSFGGKSYLAFKMMKAYHTVRIAMEFRATELSGLLLYNGQNRGKDFISLALVGGFVELRFNTGSGTGVITSKVRVEPGKWHQLVVNRNRRSGMLAVDGEHVSGESPTGTDGLNLDTDLFVGGAPEDQMAVVAERTAATVGLKGSIRLLDVNNQMYDLREKGSDVLYGSGVGECGNDPCHPNPCHHGASCHVKEAEMFHCECLHSYTGPTCADERNPCDPTPCHISATCLVLPEGGAMCACPMGREGEFCERVTEQDHTMPFLPEFNGFSYLELNGLQTLFLTCRQMSMEVVFLAKSPSGMIFYNGQKTDGKGDFVSLALHDGYLEYRYDLGKGAAVLRSKEPVPLNTWISVLLERSGRKGVMRINNGERVMGESPVPHAFLNLKEPFYVGGAPDFSKLARAAAISTSFYGAVQRISIKGVPLLKEQHIRSAVEISTFRAHPCTQKPNPCQNGGTCSPRLESYECACQRGFSGAHCEKVIIEKAAGDAEAIAFDGRTYMEYHNAVTKSEKALQSNHFELSIKTEATQGLILWSGKGLERSDYIALAIVDGFVQMMYDLGSKPVVLRSTVPINTNHWTHIKAYRVQREGSLQVGNEAPITGSSPLGATQLDTDGALWLGGMERLSVAHKLPKAYSTGFIGCIRDVIVDRQELHLVEDALNNPTILHCSAK

SEQ ID NO: 87 - protein, 166 aa, Gallus gallus; identical to SEQ ID NO: 1

SEQ ID NO: 88 - protein, 166 aa, Gallus gallus
MASGVTVNDEVIKVFNDMKVRKSSTPEEIKKRKKAVLFCLSDDKKQIIVEEAKQILVGDIGDTVEDPYTAFVKLLPLNDCRYALYDATYETKESKKEDLVFIFWAPESAPLKSKMIYASSKDAIKKKFTGIKHEWQVNGLDDIKDRSTLGEKLGGNVVVSLEGKPL

SEQ ID NO: 89 - protein, 416 aa, Gallus gallus
MESYKVMLNGPAPWGFRLQGGKDFSMPLSISRLTPGGKAAQAGVGVGDWVLYIDGESTGTMTHIEAQNRIRACGDRLCLTLSRAQNHLGKPQKDSLPCSEPPKYNFAPSTALNKTARPFGASSPPNPRPGLVTKPVTYVPLAPACTPQHNGQVSVPDPSPGAAMKTEPGLAPRTPAATPGPTSRPPWAVDPSFAERYAPDKTSTVLSKHSQPATPTPMQNRSSIVQAAQQAPESPGRTPLCYKCNKIIRGRYLVALGHYYHPEEFTCCQCRKVLDEGGFFEEKGSIFCPKCYDTRYAPSCAKCKKKITGEVMHALKMTWHVQCFTCAACKTPIRNRAFYMEEGQPYCERDYEKMFGTKCRGCDFKIDAGDRFLEALGFSWHDTCFVCAICQTNLEGKTFYSKKDKPLCKSHAFSHV

SEQ ID NO: 90 - protein, 583 aa, Gallus gallus
MPKPINVRVTTMDAELEFAIQPNTTGKQLFDQVVKTVGLREVWFFGLQYVDSKGYSTWLKLNKKVTQQDVRKENPLQFKFRAKFFPEDVSEELIQEITQRLFFLQVKEAILNDEIYCPPETAVLLASYAVQSKYGDYNKEIHKLGYLANDRLLPQRVLEQHKLTKEQWEERIQNWHEEHRGMLREDSMMEYLKIAQDLEMYGVNYFEIKNKKGTELWLGVDALGLNIYEHDDKLTPKIGFPWSEIRNISFNDKKFVIKPIDKKAPDFVFYAPRLRINKRILALCMGNHELYMRRRKPDTIEVQQMKAQAREEKHQKQLERAQLENEKKKREIAEKEKERIEREKEELMERLRQIEEQTMKAQKELEEQTRRALELDQERKRAKEEAERLEKERRAAEEAKAALAKQAADQMKNQEQLAAELAEFTAKIALLEEAKKKKEEEASEWQHKAFAAQEDLEKTKEELKSVMSAPPPPPPPPVIPPTENEHDEHDENNAEASAELSSDGVMNHRSEEERVTETQKNERVKKQLQALSSELAQARDETKKTQNDVLHAENVKAGRDKYKTLRQIRQGNTKQRIDEFEAM

SEQ ID NO: 91 - protein, 6644 aa, Gallus gallus
MEEEEYEEVVEYYIEETIVEEGEPYEVVTEITDSTSTEFTGPTTITRTIEYEKTSGEGAATPVRKKTIRTKMDTSKFLTPYLQHSNKMKDLFSENKYKEKFNKERGKPYASTIDTPEIRRIKKVQEQLSEVKYRMAGEAARTICHVDEKAWDIEHAKKVSQQVSKVLYKQNWEENKDKYLLPPDAPELVNAIKNTAMFSKKLYTEDWEGDKTLFYPYNDSPELRRVAQAQKALSDIVYKKGHDERKSKYTSLPDPPDVEQAKKVTRQLSDIIYHDDYKNKIKGKWSQTPCYDVVIAKMNAENLSMKKYQEDFENVKDQIYFMQTETPEYEANKRVSDNVSKIKYRADYEKNKAIADYNVLPATENPLLRQLKTAGDVLSDKLYKEAYERSKGTSMNYCETPKFQTDNALKNFSDVKYKDAYQKNILGHYLGSFEDPHQIHCMKVEAMKSDKNYKADYEEEKTKCYFPQTITQEYEAIKKLEQCKDHTYKKHPDQIKFTPVTDSPVQKQAEINSKQLSDKLYRSSGEEVKHKYTLPPDVPQFIQARYNAANVSDAYYKQDYHDLIAKGNNVSLDAIPITRAKASRNIASDYKYKEAYEKAKGQQVGFKSLQDDPKLVHYMHVAKIQSDREYKKDYEKSKTNYHTPPDTFSIQAAKKSQDVASTAHYKNLIHHYTYLPDAMDVELAKNMMQIQSDNVYKQDYNSWFKGIGWSPLGSLDVEKAKKAGDALNEKKYRQHPDTIKFTSVPDSMTMVLAQHNTKQLSDVAYKQEGEKVKHKYKLDPDVPQFIQARVNAFNLSDANYKADWKKTIAKGYDLKPDAIPIIAAKASRNIASDYKYKESYEKDKGRQVGYRSLQDDPKLVHYMHVAKMQSDREYKKDYEVTKTKYHTPLDMFSVTAAKKAQEAVTNTGYKQLIHHYTLLPDSVNLELSRNMMQLQSDNMYKADFNNWLRGVGWLPIQSLEVEKAKKASEILSEKKYRQHPDKLKYSIPLDAMEQVLAKQNAKTMNKRLYTDKWNKEKTSIHVMPDTPEILQSRVNQITMSNKLYKAGWEEDKKKGYDMRPDAIPIKAAKTSQDIASDYKYKLAHEKAKGKHIGFRSLEDDPKLVHFMQVAKMQSDREYKKDYEKAKTNFHTPVDMLSVVAAKKAQEVATNANYKNLIHVYNVLPDAMSLELAKNMMQIQSNNQYRAEYDESMKGVGWMPLGSLEAEKNKKAMEILSEKKYRQHPDKLKYSVPVDSMNMALALHNAKIMDEHQYKQAWEEDKKKVHMTPDIPQFALAKANAFNISDKMYRHSFEEARKKGYDLRSDAIPIKAAKASRDIASDYKYKLGYEQDKGKLVGFRSLQDDPKLVHYMQVAKMQSDREYKKAYETSKTHYQTPSDALSIMAAKEAQDRVTNANYKRLIHHYMLLPDAMSFELYRNMNQIQSNNEYKQDYNEWFKGIGWSPAGSLDVEKSKKATEIASDQKYRQHPSIFPFTKQIDAMDMVLAKHNADIMNKHAYTQAWEKDKTQVHVMPDTPDILQAKQNKANYSQKQYKLDWQEMIKKGYDLTPEAISVKAAKASRDIASDYKYKEGYRKQQGHHIGFRSLQDDPKMMWSMQVAKMQSEREYKKDFEKWKTKFNMPVDMLGFLLAKKCQELVSDIDYKHMLHRWTCLPDQNDVTQAKRVYELQSDNLYKSDLQWLRGIGWSPLGSLESEKNKKASEILSEKKYRQHPDTIKFTSIPDAMNIILAKSNAKNRSDILYREAWDKDKTQVHIMPDTPEILLAKSNLINTSDKHYKLGYEELRRKGYDLPPDAIPLKSAKASRDIASEYQYKTAYRKQLGHHVGARNIEDDPKMMWSMHVAKIQSDREYKKAFEKTKTHFSSPVDMLGIVLAKKCQELVSDVDYKHLLHRWTCLPDQNDVVQARKVYDLQSDNVYKSDLQWLRGIGWSPLGSLDEEKNKRASMILSDKKYRQHPDTIKFTSLPDSMPMVLAKHNSEIMNHRSYIAAWEKDKTSIHIMPDTPGILLAQQNKVNYSEKMYRLAMEEDKKKGYDLRADAIPIKAAKASRDIASDYKYKEGYRKQLGHHIGARNIEDDPKMMWSMHVAKVQSDREYKKAFEKTKTHFSSPVDMLGIVLAKKCQELVSDVDYKHLLHRWTCLPDQNDVVQARKVYDLQSDNVYKSDLQWLRGIGWSPLGSLDEEKNKRASMILSDKKYRQHPDTIKFTSLPDSMPMVLAKHNSEIMNHRSYIAAWEKDKTSIHIMPDTPGILLAQQNKVNYSEKMYRLAMEEDKKKGYDLRADAIPIKAAKASRDIASDYKYKEGYRKQLGHHIGARNIEDDPKMMWSMHVAKVQSDREYKKAFEKTKTHFSSPVDMLGIVLAKKCQELVSDVDYKHLLHRWTCLPDQNDVVQARKVYDLQSDNVYKSDLQWLRGIGWSPLGSLDEEKNKRASMILSDKKYRQHPDTIKFTSLPDSMPMVLAKHNSEIMNHRSYIAAWEKDKTSIHIMPDTPGILLAQQNKVNYSEKMYRLAMEEDKKKGYDLRADAIPIKAAKASRDIASDYKYKEGYRKQLGHHIGARNIEDDPKMMWSMHVAKVQSDREYKKAFEKTKTHFSSPVDMLGIVLAKKCQELVSDVDYKHLLHRWTCLPDQNDVVQARKVYDLQSDNVYKSDLQWLRGIGWSPLGSLDEEKNKRASMILSDKKYRQHPDTIKFTSLPDSMPMVLAKHNSEIMNHRSYIAAWEKDKTSIHIMPDTPGILLAQQNKVNYSEKMYRLAMEEDKKKGYDLRADAIPIKAAKASRDIASDYKYKEGYRKQLGHHIGARNIEDDPKMMWSMHVAKIQSDREYKKAFEKTKTHFSSPVDMLGIVLAKKCQELVSDVDYRHYLHQWICLPDQNDVIHARKAYDLQSDNFYKSDLEWMRGIGWVPIGSLDIEKAKRAGQILSDKVYRQPPDTIKFTSVTDSLEMTLAKHNAEMMNKRLYTEAWDKDKTQIHIMPDTPEITLAKQNMHNYSEKLYKQAMEEAKKKGYDLRSDAIPIQAAKASRQIASDYKYKEGYRKQLGHHIGARNIEDDPKMMWSMHVAKIQSDREYKKAFEKTKTHFSSPVDMLGIVLAKKCQELVSDVDYRHYLHQWICLPDQNDVIHARKAYDLQSDNFYKSDLEWMRGIGWVPIGSLDVEKAKRAGQILSDKVYRQPPDTIKFTSVTDSLEMTLAKHNAETMNKRLYTEAWNKDKTTIHVMPDTPEILLAKQNQAHYSQKMYKLALEESKKKGHDLRFDAIPIQAAKASREIASDYKYKEGYRKQLGHHIGARNIEDDPKMMWSMHVAKIQSDREYKKAFEKTKTHFSSPVDMLGIVLAKKCQELVSDVDYRHYLHQWICLPDQNDVIHARKAYDLQSDAVYKSDLEWLKGIGWVPIGSLDVEKAKKAGEILSDRKYRQPADQIKFTSVTDSLAMMLAKHNAEIMNKRLYTEAWDADKTSIHVMPDTPTILLAKANAANVSHKHYVQAWEDAKKKGYDMRADAIPIRSAKASRDIASDYKYKEAHEKQKGHYIGCRTAKEDPKLSWAARAMLLQNDRIYRKAYNDSKAHIHMPVDAMSLQAAKECQTLVSDVDYRHYLHQWTCLPDQNDVMHARKAYDLQSDNVYKSDLEWLRGIGWLTEGSVDVIKAKKAQEILSDRLYRTQPDKMKFTSITDTPDVVQAKINAMQLSNHLYREVWDKDKTQISIPSDTPELLQSKLNALNISNKHYQKAWDEAKAKNYDLRADAIPIKHAKASRDIASEYKYKEAHEKQKGHYIGCRTAKEDPKLSWAARAMLLQNDRIYRKAYNDSKAHIHMPVDAMSLQAAKECQTLVSDVDYRHYLHQWTCLPDQNDVMHARKAYDLQSDNVYKSDLEWLRGIGWLTEGSVDVVKAKKAQEILSDRLYRTQPDKMKFTSVTDAPDVVQAKINAMQLSNRLYREAWDKDKTQISIPSDTPEMLQSKVNALNISNKHYQKAWDEAKAKNYDLRADAIPIKHAKASRDIASEYKYKEAHEKQKGHYIGCRTAKEDPKLSWAARAMLLQNDRIYRKAYNDSKAHIHMPVDAMSLQAAKECQTLVSDVDYRHYLHQWTCLPDHNDVVHARKAYDLQSDAVYKSDLEWLRGIGWLPNDSPGVQRVKHAQDLLSDKVYRTPIDSVKYTSVVDSPDILLAKMNAEQLSIPKYKEAWEKDKTMIHIMPDTPEITLARSNAHNYSQKLYKEAWDEVKMSYDLRADAIPIKAAKASREIASDYKYKLDHEKQKGHYVGVPNAKADTKIRFALGIGKVQSELEYKKHFAKWKTQCHLPVDMLSIQSAKHGQSLVSDVDYRHYLHQWICLPDQNDVIHARKAYDLQSDAVYKSDLEWLRGIGWLPNDSLGINHVKHAGDLLNERKYRTKAETLHFTPVADRVDYVTAKKSGEILSDIKYHKDWNEVKSNYTLTDTPQLDMAREAARILNQSLYKESWEKEKATGYLLPPDTVQIRHAKHSNDVQSELKYKADYVKQRGHYVGVASMRDDPKLVWFEHAGEIQNDRLYKSNYHKTKSKIHIPADIMSVVAAKECQALVSDVDYRHYLHQWTCHPDQNDCIQARKAYDLQSDNIYKSDLEWLRGCGWIPLGSVEHKKVKHAQELINKRAYTKDAIENFSKYTSVVDTPDIVLAKINSVNQSDLKYKETFNLEKGQYIGSDDTPELNHARDMSLLYSDKLYKRDWEVCKPIGYTLDAKYIPLVGAKHANYVNSELKYKEIYEKLKGHYLAGKDIGDFPSVVHSLAFQKIRSALAYRKNYEDTKTRVHIPSDMMNHVLAKKCQYILSDLEYRTYLHHWNCSPEEHDVIQARRAQEILSDVVYKDDLNWLKGIGCYVWDTPQILHAKKSYDLQSQIKYTAAGKENFQNFGVVTDTPVYVTAVQSGINASDVKYKEDYHKTKDKYTTVTETADSERVQNLKHLFSNNLYKEAWDRVKATSYIMPSDAVSLARAKELKHNASIVKYREEYDKFKALYTLPRSVEDDPNTARCLRVGKLNIDRLYKETYEKNKAKVHIIPDMVDIIAAKDAQKKISEIDYRTHLHDWICLPDLQINAHVRKVADQISDVVYKDDLNWLKGIGCFVWDTPEILHAKHAYDLRSDIKYKSDADKMKSKYTVVMDTPVYVQNILSGLNASEVIYRGDYLKKVRGKMIPTDKTVDLQRAHHANKIQSENLYRWAGLKALPTGYSLPKDTPGFQHAKHVQHIGSDLKYKEAYEHMKAKGYTLGPNDVGFENVKKVNQVINERLYRATYHKNKDKIHTTPDTPEIRQVRATQEAVSDLIYKSDFFKLQGHLISLPFTPQVLHCRYVGDITSDNKYKEDLKWLQGLGCFLYDTPDMVRARQLRKLWSNYVYTDSAKKMRDKYSVVLDTPGYRTVQELKTHLSDLVYRAAGKELKTKYTSVLNTPDFLRAKEGQRIQSQYLYVALATKERPHHHAGNQTPAFTHARHVKDMVSETKYKIQYEKMKDKYTPVLDTPILIRAKRAYLNASDLRYKETFENTKGKYHTVKDALDIVYHRKVTDDISSVKYKENYMSQLGIWRSIPDRPEHFHHRAVTDAISDVKYKEDLSWLRGIGCYAWDTPDFALAEKNKVLYSGHKYKETFEKTKSHFKYVADSPINRHFKHATQLLDANSYKSLAKMLLKQGCNEILRPDILTALYNSYLWSQVEYKKDYEKKKDKYTTVVDTPENIRTAKVNKQISDIIYKLEYNKAKPKGYTTIHDTPMLLHVRKVKDRISDLKYKELYERNKSHCNVVADSVHIKTPRHAYKLNSNLDYKKKYEAAKAHWHWIADRPDFVQAAKSSLQQSDYEYKLDREYLKGCKLSVTDDKNTVLALNNAILASDIKYKEKHNKARGTCLVVPDTPQILLAKNVSSLVSENKYKEHSKKQLPRGSYTTLPETRDTAHVKEVTKNVSDTNYKKKFVKEKGKSNYSIMLEPPEVKHAMEVAKKQSTVEYKKDAKSKLHYTPIADRPDIKKATQAAKLISDIEYKKRGEAGLGVTMLGRPDIELAKEVSKLTSQVKYKENFSKEKGKKPKYDLKEAKIYKTMKDAHNIASEVKYKADLKKLHKPVTDMSESLIMNHVLNTSQLASAVKYKEKYEKEKGKPMLDFETPTYLTAKESQLMQSEKEYRKDLEEGVKGKGLSVLEETPDMLRAKNATQILNEKEYKKALELEIKGKGLSELALETPDFVRAKNATDIASQIKYKQLAEMEKANYTSVVDTPEIIHAQQVKNLSSQKKYKEEAEKTMPYYVPVADTPEMQRVRENQKNFSTLQYQWDLQNSKGKVTVVQDTPEMLRVKENQKNFSSIKYKESIGKGTPIPDLPEVKRVKETQKHISSVLYKEHLAKGTPTPMTPEMERAKRNQENISSVLYSDSFRKQVQGKAAYVLDTPEMRRVRETQKHISTVKYHEDFEKNKGTFTPVVTDPITERVKKNMHDFSDISYRGIQRRVVEMEQKRVDQDQENLTGLRVWRTNPGSVFDYDPAEDNIQSRSLHMISVQAQRRSREHSRSASALSISGGDEKSEPSEGVNQHLSYYSSGGFFTTTATVGYKHAKTIELPQQRSASVATQQTTVSSVPSHPSTAGKTYRAMYDYTAADADEVSFKDGDTIVNVQAIDEGWMYGTVQRTGKTGMLPANYVEAV

SEQ ID NO: 92 - protein, 6754 aa, Gallus gallus
MEEEEYEEVVEYYIEETIVEEGEPYEVVTEITDSTSTEFTGPTTITRTIEYEKTSGEGAATPVRKKTIRTKMDTSKFLTPYLQHSNKMKDLFSENKYKEKFNKERGKPYASTIDTPEIRRIKKVQEQLSEVKYRMAGEAARTICHVDEKAWDIEHAKKVSQQVSKVLYKQNWEENKDKYLLPPDAPELVNAIKNTAMFSKKLYTEDWEGDKTLFYPYNDSPELRRVAQAQKALSDIVYKKGHDERKSKYTSLPDPPDVEQAKKVTRQLSDIIYHDDYKNKIKGKWSQTPCYDVVIAKMNAENLSMKKYQEDFENVKDQIYFMQTETPEYEANKRVSDNVSKIKYRADYEKNKAIADYNVLPATENPLLRQLKTAGDVLSDKLYKEAYERSKGTSMNYCETPKFQTDNALKNFSDVKYKDAYQKNILGHYLGSFEDPHQIHCMKVEAMKSDKNYKADYEEEKTKCYFPQTITQEYEAIKKLEQCKDHTYKKHPDQIKFTPVTDSPVQKQAEINSKQLSDKLYRSSGEEVKHKYTLPPDVPQFIQARYNAANVSDAYYKQDYHDLIAKGNNVSLDAIPITRAKASRNIASDYKYKEAYEKAKGQQVGFKSLQDDPKLVHYMHVAKIQSDREYKKDYEKSKTNYHTPPDTFSIQAAKKSQDVASTAHYKNLIHHYTYLPDAMDVELAKNMMQIQSDNVYKQDYNSWFKGIGWSPLGSLDVEKAKKAGDALNEKKYRQHPDTIKFTSVPDSMTMVLAQHNTKQLSDVAYKQEGEKVKHKYKLDPDVPQFIQARVNAFNLSDANYKADWKKTIAKGYDLKPDAIPIIAAKASRNIASDYKYKESYEKDKGRQVGYRSLQDDPKLVHYMHVAKMQSDREYKKDYEVTKTKYHTPLDMFSVTAAKKAQEAVTNTGYKQLIHHYTLLPDSVNLELSRNMMQLQSDNMYKADFNNWLRGVGWLPIQSLEVEKAKKASEILSEKKYRQHPDKLKYSIPLDAMEQVLAKQNAKTMNKRLYTDKWNKEKTSIHVMPDTPEILQSRVNQITMSNKLYKAGWEEDKKKGYDMRPDAIPIKAAKTSQDIASDYKYKLAHEKAKGKHIGFRSLEDDPKLVHFMQVAKMQSDREYKKDYEKAKTNFHTPVDMLSVVAAKKAQEVATNANYKNLIHVYNVLPDAMSLELAKNMMQIQSNNQYRAEYDESMKGVGWMPLGSLEAEKNKKAMEILSEKKYRQHPDKLKYSVPVDSMNMALALHNAKIMDEHQYKQAWEEDKKKVHMTPDIPQFALAKANAFNISDKMYRHSFEEARKKGYDLRSDAIPIKAAKASRDIASDYKYKLGYEQDKGKLVGFRSLQDDPKLVHYMQVAKMQSDREYKKAYETSKTHYQTPSDALSIMAAKEAQDRVTNANYKRLIHHYMLLPDAMSFELYRNMNQIQSNNEYKQDYNEWFKGIGWSPAGSLDVEKSKKATEIASDQKYRQHPSIFPFTKQIDAMDMVLAKHNADIMNKHAYTQAWEKDKTQVHVMPDTPDILQAKQNKANYSQKQYKLDWQEMIKKGYDLTPEAISVKAAKASRDIASDYKYKEGYRKQQGHHIGFRSLQDDPKMMWSMQVAKMQSEREYKKDFEKWKTKFNMPVDMLGFLLAKKCQELVSDIDYKHMLHRWTCLPDQNDVTQAKRVYELQSDNLYKSDLQWLRGIGWSPLGSLESEKNKKASEILSEKKYRQHPDTIKFTSIPDAMNIILAKSNAKNRSDILYREAWDKDKTQVHIMPDTPEILLAKSNLINTSDKHYKLGYEELRRKGYDLPPDAIPLKSAKASRDIASEYQYKTAYRKQLGHHVGARNIEDDPKMMWSMHVAKIQSDREYKKAFEKTKTHFSSPVDMLGIVLAKKCQELVSDVDYKHLLHRWTCLPDQNDVVQARKVYDLQSDNVYKSDLQWLRGIGWSPLGSLDEEKNKRASMILSDKKYRQHPDTIKFTSLPDSMPMVLAKHNSEIMNHRSYIAAWEKDKTSIHIMPDTPGILLAQQNKVNYSEKMYRLAMEEDKKKGYDLRADAIPIKAAKASRDIASDYKYKEGYRKQLGHHIGARNIEDDPKMMWSMHVAKVQSDREYKKAFEKTKTHFSSPVDMLGIVLAKKCQELVSDVDYKHLLHRWTCLPDQNDVVQARKVYDLQSDNVYKSDLQWLRGIGWSPLGSLDEEKNKRASMILSDKKYRQHPDTIKFTSLPDSMPMVLAKHNSEIMNHRSYIAAWEKDKTSIHIMPDTPGILLAQQNKVNYSEKMYRLAMEEDKKKGYDLRADAIPIKAAKASRDIASDYKYKEGYRKQLGHHIGARNIEDDPKMMWSMHVAKVQSDREYKKAFEKTKTHFSSPVDMLGIVLAKKCQELVSDVDYKHLLHRWTCLPDQNDVVQARKVYDLQSDNVYKSDLQWLRGIGWSPLGSLDEEKNKRASMILSDKKYRQHPDTIKFTSLPDSMPMVLAKHNSEIMNHRSYIAAWEKDKTSIHIMPDTPGILLAQQNKVNYSEKMYRLAMEEDKKKGYDLRADAIPIKAAKASRDIASDYKYKEGYRKQLGHHIGARNIEDDPKMMWSMHVAKVQSDREYKKAFEKTKTHFSSPVDMLGIVLAKKCQELVSDVDYKHLLHRWTCLPDQNDVVQARKVYDLQSDNVYKSDLQWLRGIGWSPLGSLDEEKNKRASMILSDKKYRQHPDTIKFTSLPDSMPMVLAKHNSEIMNHRSYIAAWEKDKTSIHIMPDTPGILLAQQNKVNYSEKMYRLAMEEDKKKGYDLRADAIPIKAAKASRDIASDYKYKEGYRKQLGHHIGARNIEDDPKMMWSMHVAKIQSDREYKKAFEKTKTHFSSPVDMLGIVLAKKCQELVSDVDYRHYLHQWICLPDQNDVIHARKAYDLQSDNFYKSDLEWMRGIGWVPIGSLDVEKAKRAGQILSDKVYRQPPDTIKFTSVTDSLEMTLAKHNAETMNKRLYTEAWNKDKTTIHVMPDTPEILLAKQNQAHYSQKMYKLALEESKKKGHDLRFDAIPIQAAKASREIASDYKYKEGYRKQLGHHIGARNIEDDPKMMWSMHVAKIQSDREYKKAFEKTKTHFSSPVDMLGIVLAKKCQELVSDVDYRHYLHQWICLPDQNDVIHARKAYDLQSDAVYKSDLEWLKGIGWVPIGSLDVEKAKKAGEILSDRKYRQPADQIKFTSVTDSLAMMLAKHNAEIMNKRLYTEAWDADKTSIHVMPDTPTILLAKANAANVSHKHYVQAWEDAKKKGYDMRADAIPIRSAKASRDIASDYKYKEAHEKQKGHYIGCRTAKEDPKLSWAARAMLLQNDRIYRKAYNDSKAHIHMPVDAMSLQAAKECQTLVSDVDYRHYLHQWTCLPDQNDVMHARKAYDLQSDNVYKSDLEWLRGIGWLTEGSVDVIKAKKAQEILSDRLYRTQPDKMKFTSITDTPDVVQAKINAMQLSNHLYREVWDKDKTQISIPSDTPELLQSKLNALNISNKHYQKAWDEAKAKNYDLRADAIPIKHAKASRDIASEYKYKEAHEKQKGHYIGCRTAKEDPKLSWAARAMLLQNDRIYRKAYNDSKAHIHMPVDAMSLQAAKECQTLVSDVDYRHYLHQWTCLPDQNDVMHARKAYDLQSDNVYKSDLEWLRGIGWLTEGSVDVVKAKKAQEILSDRLYRTQPDKMKFTSVTDAPDVVQAKINAMQLSNRLYREAWDKDKTQISIPSDTPEMLQSKVNALNISNKHYQKAWDEAKAKNYDLRADAIPIKHAKASRDIASEYKYKEAHEKQKGHYIGCRTAKEDPKLSWAARAMLLQNDRIYRKAYNDSKAHIHMPVDAMSLQAAKECQTLVSDVDYRHYLHQWTCLPDHNDVVHARKAYDLQSDAVYKSDLEWLRGIGWLPNDSPGVQRVKHAQDLLSDKVYRTPIDSVKYTSVVDSPDILLAKMNAEQLSIPKYKEAWEKDKTMIHIMPDTPEITLARSNAHNYSQKLYKEAWDEVKMSYDLRADAIPIKAAKASREIASDYKYKLDHEKQKGHYVGVPNAKADTKIRFALGIGKVQSELEYKKHFAKWKTQCHLPVDMLSIQSAKHGQSLVSDVDYRHYLHQWICLPDQNDVIHARKAYDLQSDAVYKSDLEWLRGIGWLPNDSLGINHVKHAGDLLNERKYRTKAETLHFTPVADRVDYVTAKKSGEILSDIKYHKDWNEVKSNYTLTDTPQLDMAREAARILNQSLYKESWEKEKATGYLLPPDTVQIRHAKHSNDVQSELKYKADYVKQRGHYVGVASMRDDPKLVWFEHAGEIQNDRLYKSNYHKTKSKIHIPADIMSVVAAKECQALVSDVDYRHYLHQWTCHPDQNDCIQARKAYDLQSDNIYKSDLEWLRGCGWIPLGSVEHKKVKHAQELINKRAYTKDAIENFSKYTSVVDTPDIVLAKINSVNQSDLKYKETFNLEKGQYIGSDDTPELNHARDMSLLYSDKLYKRDWEVCKPIGYTLDAKYIPLVGAKHANYVNSELKYKEIYEKLKGHYLAGKDIGDFPSVVHSLAFQKIRSALAYRKNYEDTKTRVHIPSDMMNHVLAKKCQYILSDLEYRTYLHHWNCSPEEHDVIQARRAQEILSDVVYKDDLNWLKGIGCYVWDTPQILHAKKSYDLQSQIKYTAAGKENFQNFGVVTDTPVYVTAVQSGINASDVKYKEDYHKTKDKYTTVTETADSERVQNLKHLFSNNLYKEAWDRVKATSYIMPSDAVSLARAKELKHNASIVKYREEYDKFKALYTLPRSVEDDPNTARCLRVGKLNIDRLYKETYEKNKAKVHIIPDMVDIIAAKDAQKKISEIDYRTHLHDWICLPDLQINAHVRKVADQISDVVYKDDLNWLKGIGCFVWDTPEILHAKHAYDLRSDIKYKSDADKMKSKYTVVMDTPVYVQNILSGLNASEVIYRGDYLKKVRGKMIPTDKTVDLQRAHHANKIQSENLYRWAGLKALPTGYSLPKDTPGFQHAKHVQHIGSDLKYKEAYEHMKAKGYTLGPNDVGFENVKKVNQVINERLYRATYHKNKDKIHTTPDTPEIRQVRATQEAVSDLIYKSDFFKLQGHLISLPFTPQVLHCRYVGDITSDNKYKEDLKWLQGLGCFLYDTPDMVRARQLRKLWSNYVYTDSAKKMRDKYSVVLDTPGYRTVQELKTHLSDLVYRAAGKELKTKYTSVLNTPDFLRAKEGQRIQSQYLYVALATKERPHHHAGNQTPAFTHARHVKDMVSETKYKIQYEKMKDKYTPVLDTPILIRAKRAYLNASDLRYKETFENTKGKYHTVKDALDIVYHRKVTDDISSVKYKENYMSQLGIWRSIPDRPEHFHHRAVTDAISDVKYKEDLSWLRGIGCYAWDTPDFALAEKNKVLYSGHKYKETFEKTKSHFKYVADSPINRHFKHATQLLDANSYKSLAKMLLKQGCNEILRPDILTALYNSYLWSQVEYKKDYEKKKDKYTTVVDTPENIRTAKVNKQISDIIYKLEYNKAKPKGYTTIHDTPMLLHVRKVKDRISDLKYKELYERNKSHCNVVADSVHIKTPRHAYKLNSNLDYKKKYEAAKAHWHWIADRPDFVQAAKSSLQQSDYEYKLDREYLKGCKLSVTDDKNTVLALNNAILASDIKYKEKHNKARGTCLVVPDTPQILLAKNVSSLVSENKYKEHSKKQLPRGSYTTLPETRDTAHVKEVTKNVSDTNYKKKFVKEKGKSNYSIMLEPPEVKHAMEVAKKQSTVEYKKDAKSKLHYTPIADRPDIKKATQAAKLISDIEYKKRGEAGLGVTMLGRPDIELAKEVSKLTSQAEYLKRHMRGHGAASYDTPWMRTFKKANMLSSHVKYKENFSKEKGKKPKYDLKEAKIYKTMKDAHNIASEVKYKADLKKLHKPVTDMSESLIMNHVLNTSQLASAYQYKKQYEKSKGHYHMVPDNLEQVHLREASELQSHVKYKEKYEKEKGKPMLDFETPTYLTAKESQLMQSEKEYKRDFEESIKGRNLTGLEITPSLLHVKYATKIASEKEYRKDLEEGVKGKGLSVLEETPDMLRAKNATQILNEKEYKKALELEIKGKGLSELALETPDFVRAKNATDIASQIKYKQLAEMEKANYTSVVDTPEIIHAQQVKNLSSQKKYKEEAEKTMPYYVPVADTPEMQRVRENQKNFSTLQYQWDLQNSKGKVTVVQDTPEMLRVKENQKNFSSILYKEDIGTGTTIEKTPEMQRVKRTQDAISSIKYKESIGKGTPIPDLPEVKRVKETQKHISSVLYKEDLGTGIPTPVTPEIERVKRNQEHISSVLYKEELGTGTPIPVTPEVERVKRNQEHISSVLYKESVGTGTPTPITPEMERVKRNQEICSSVLYKENIGKATPTPVTPEMERVKRNQEIISSVLYKENVGKVTPTPITPEMERVKRNQEIISSVLYKESLGRATPTPITPEMERVKRNQEQISSVVYKEGLGKATPTPVTPEMERVRRNQEQISSVLYKEHLAKGTPTPMTPEMERAKRNQENISSVLYSDSFRKQVQGKAAYVLDTPEMRRVRETQKHISTVKYHEDFEKNKGTFTPVVTDPITERVKKNMHDFSDISYRGIQRRVVEMEQKRVDQDQENLTGLRVWRTNPGSVFDYDPAEDNIQSRSLHMISVQAQRRSREHSRSASALSISGGDEKSEPSEGVNQHLSYYSSGGFFTTTATVGYKHAKTIELPQQRSASVATQQTTVSSVPSHPSTAGKTYRAMYDYTAADADEVSFKDGDTIVNVQAIDEGWMYGTVQRTGKTGMLPANYVEAV

SEQ ID NO: 93 - protein, 6909 aa, Bos taurus
MADDEEYEEVVEYYTEETVYEEVPGETRTRFYETTTTRTSDYEQSETSRPALAQPVPEKPVERKRVIRKKVDPSKFMTPYIAHSQKMQNLFSTNKYKENYEKAKGKPYAITTDTPELRRIKKVQDQLSEVKYRVDGDVAKTICHVDEKAKDIEHAKKVSQQVSKVLYKQNWEDTKDKYLLPPDAPELVQAIKNTAMFSKKLYTEDWEADKTMFYPYNDSPELRRVAQAQKALSDIAYKKGLAEQQTQFTSLPDPPDIEFAKKVTNQVSKQKYKEDYENKVKGKWSETPCFEIATARMNSNNISTKKYQEDFEHMKDQIYFMQTETPEYKVNKQAGVAASKVKYKQDYEKNKGKADYNVLPASENPLLRQLKAAGDALSDKLYKENYEKTKAKSINYCETPKFKLDTVLHNFSSDTKYKDSYLKDILGHYVGSYEDPYHTHCMRVSAQNSDKNYKAEYEEDRGKGFFPQTITQEYEAIKKLDQCKDHTYKVHPDKTKFTQVTDSPVLMQAQVNSKQLSDLNYKAKHENEKFKCHIPPDTPAFIQHKLNAYNLSDNIYKHDWEKTKAKKFDIKVDAIPLLAAKANTKIASDVMYKKDYEKSKGKMIGALSINDDPKMLHSLKTAKNQSDRLYKENYEKTKAKSMNYCETPKYQLDTLLKNFSEAKYKDSYVQNVLGHYIGSFEDPYQVHCLKISAQNSDKNYKAEYEEDKGKCYFPQTITQEYEAIKKLDQCKDHTYKVHPDKTKFTAVTDTPVLLQAQLNTKQLSDLNYKAKHEGEKFKCHIPADAPQFIQHRVNAYNLSDNIYKHDWEKTKAKKFDIKVDAIPLLAAKANTKIASDVMYKKDYEKSKGKMIGALSINDDPKMLHSLKTAKNQSDHEYRKDYEKSKTIYTAPLDMLPLTHAKKSQAIASDVDYKHLLHNYSYPPDSVNVDLAKKAYALQSDVEYKADYNSWMKGCGWMPFGSLEMEKAKRASDILNEKKYRQHPDTLKFTSIEDAPIIVQSKINQAQRSDVAYKAKGEEVIHKYSLPADLPQFIQAKVNAYNISENLYKADLKDLSKKGYDLRIDAIPIKAAKAARQAASDVQYKKDYEKAKGKMVGFQSLQDDPKLVHYMNVAKIQSDREYKKAYEKTKTRHNTPHDMVNIVAAKKAQDVASNVNYKHSLHHYTYLPDAMDLELSKNMMHIQSDNVYKEDYNNWMKGIGWIPIGSLEVEKVKKAGDALNEKKYRQHPDTLKFTSIVDSPVMVQAKQNTQQVSDILYKAKGEDVKHKYTMSPDLPQFLQAKCNAYNLSDVCYKRDWHDLIAKGTNVLGDAIPITAAKASRNIASDYKYKEAYEKAKGKQVGFRSLQDDPKLVHYMNVAKLQSDREYKKNYENTKTSYHTPGDMVSITAAKMAQDVATNVNYKQPIHHYTYLPDALSLEHIRNVNQIQSDNVYKDEYNHFFKGMGWIPIGSLEVEKVKKAGDALNEKKYRQHPDTIKFTSVPDSMGMVLAQHNTKQLSDLNYKVEGEKVKHKYTMDPDVPQFIQAKVNAYNMSDSHYKADWKKTLAKGYDLRPDAIPIVAAKSSRNIASDFKYKEAYEKTKGKQIGFRSLQDDPKLVHFMNVAKMQSDREYKKGYEASKTKYHTPLDMLSVTAAKKSQEVATNTNYKQPFHHYTLLPDALNVEHSRNAMQIQSDNLYKSDFTNWMKGIGWLPLESLEVEKAKKAGEILSEKKYRQHPEKLKFTYAMDTMEQALNKSNKLIMDKRLYTEKWNKDKTTIHVMPDTPDILLSRVNQITMSDKLYKAGWEEEKKKGYDLRPDAISIKAARASRDIASDYKYKQAYEQAKGKQIGFRSLEDDPKLVHFMQVAKMQSDREYKKAYEKSKTSFQTPVDMLSVVAAKKSQEVATNANYRNVIHTYNMLPDAMSLELAKNMMQIQSDNQYKADYADFMKGIGWLPLGSLEAEKNKKAMEIISEKKYRQHPDTLKYSTLMDSMNMVLAKNNAKIMNEHLYKQAWEADKTKVHIMPDIPQIILAKANAINISDKLYKLSLEEAKKKGYDLRTDAIPIKAAKASRDIASDYKYKHSYEKERGKMVGFRSLEDDPKLVHSMQVAKMQSDREYKKNYEKTKTSYHTPADMLSVTAAKDAQANITNTNYKHLIHKYILLPDAMNIQLSKNMNRIQSDNEYKQDYNEWYKGLGWSPAGSLEVEKAKKATEYASDQKYRQHPSNFQFTKLNDSMDMVLAKQNAHTMNKYLYTVDWNKDKTKIHVMPDTPDILQAKQNQTMYSQVKYKMGWPSGLERVVNLPSVLIKIFKSKQNKDLIWRFKYKQGYRKQIGHHIGFRSLQDDPKLVLSMNVAKMQSEREYKKDFEKWKTKFSSPVDMLGVVLAKKCQALVSDVDYKNYLHGWTCLPDQNDVIHAKKAYDLQSENLYKSDLEWLKGIGWSPLGSLEAEKNKRASEIISEKKYRQPPDRNKFTSIPDAMDIVLAKTNAKNRSDILYREAWDKDKTQIHIMPDTPDIILAKANLINTSDKFYRMGYEELRKKGYDLPVDAIPIKAAKASREIASEYKYKEGFRMQLGHHIGARNIKDDPKMMWSMHVAKIQSDREYKKDFEKWKTKFSSPVDMLGVVLAKKCQTLVSDIDYKNYLHQWTCLPDQSDVIHARRAYDLQSDNLYKSDLQWLRGIGWLPSGSLEDEKNKRASQILSDHVYRQHPDQFKFSSLMDSIPMVLAKNNAITMNHRLYTEAWDKDKTTVHIMPDTPEVLLAKQNQINYSEKLYKLGLDEAKRKGYDMRIDAIPIRAAKASRDIASEFKYKEGYRRQLGHHIGARAIHDDPKMMWSMHVAKIQSDREYKKDFEKWKTKFSSPVDMLGVVLAKKCQTLVSDIDYKNYLHQWTCLPDQSDVIHARQAYDLQSDNVYKSDLQWLRGIGWVPIGSLDVEKSKRASEILSDKLYRQPPDKFKFTSVTDSLEQVLAKNNAINMNKRLYTEAWDKDKTQVHIMPDTPEITLARTNKVNYSENLYKLAHEEAKKKGYDLRSDAIPIIAAGLEKDHISDYKYKDGYRKQLGHHIGARDIKDDPKMMWSMHVAKIQSDREYKKDFEKWKTKFSSPVDMLGVVLAKKCQTLVSDIDYKNYLHQWTCLPDQSDVIHARQAYDLQSDNVYKSDLQWLRGIGWVPIGSVDVVKCKRAAEILSDNLYRQPPDTLKFTSVPDSLEQVLAKNNAINMNKRLYTEAWDKDKTQIHIMPDTPEIMLARQNKLNYSETLYKLANEEAKKKGYDLRSDAIPIVAAKASRDIISDYKYKDGYRKQLGHHIGARDIKDDPKMMWSMHVAKIQSDREYKKDFEKWKTKFSSPVDMLGVVLAKKCQTLVSDIDYKNYLHQWTCLPDQSDVIHARRAYDLQSDNIYKSDLQWLRGIGWVPIGSVDVVKCKRAAEILSDNLYRQRPDTLKFTSVPDSLEQVLAKNNAINMNKRLYTEAWDKDKTQIHMMPDTPEITLARQNKINYSENLYRQAMEEAKKEGYDLRSDAIPIVAAKASREIASDYKYKEAYRKQLGHHIGARAIHDDPKMMWSVHVAKMQSDREYKKDFEKYKTRFSSPVDMLGIVLAKKCQTLVSDVDYKHPLHEWTCLPDQNDIIHARKAYDLQSDNLYKSDLEWLKGIGWVPIGSVEVLKAKRAGEILSDNIYRQRPDTLKFTSVTDSPEQVLAKNNAINMNKRLYTEAWDNDKKTIHVMPDTPEIMLAKLNRINYSDKLYKLALEESRKEGYDLRLDAIPIQAAKASREIASDYKYKEGYRKQLGHHIGARNIKDDPKMMWSIHAGKLQSDLEYKKDFEKWKTKFSSPVDMMGLVQAKKCQILVSDIDYKNLLHEWTCLPDQNDIIQARKAYDLQSDAIYKADLEWLRGIGWVPIDSVGVEHAKRAGEILSERKYRQPAVQLKFTSITDTPEIVLAKNNALNVSKHLYTEAWDADKTSIHVMPDTPEILLAKSNSANISHKLYTKGWDESKMKDYDLRADAISIKSAKASRDIASDYKYKEAYEKHKGHHIGARSVEDDPRIMCAMNAGRIQSEREYKKEFQKWKTKFSSPVDMLGILLAKKCQTLVSDIDYRNYLHHWTCLPDQNDIIQARKAYDLQSDAIYKADLEWLRGIGWMPEGSPEVLRVKNAQHIFRDSVYRTPVVKLKYTSIVDTPEVVLAKSNAENISIPKYREVWDKDKTSIHIMPDTPEINLARTNALNVSNKLYREGWDEMKMSCDVRLDAIPIQAAKASREIASDYKYKLDHEKQKGHYVGTRTARDDNKIRWALIAGKIQNEREYRLHWAKWKSKFQSPPDMLSIEHSKNSQTLVSDIDYRHYLHQWTCMPDQNDVIQARKAYDLQSDAIYKADLEWLRGIGWMPADSVSVNHAKHMADIFNEKKYRTKIETLSFTPVDDRVDYVTAKHSGEILNDIKYRKDWNDTKSKYTLTETPQLHTAQEAARILDQYLYKESWEKQKATGYILPPDAVPFVHAHHSGDVQSELKYKAEHVKQKGHYVGVPTMRDDPKLVWFEHAGQIQNDRLYKENYHKTKAKIHIPPDMVSVLAAKEGQALASDIDYRNYLHQWICHPDQNDVIQARKAYDLQSDNIYKADLEWLRGIGWIPLDSVDHVRVTRNQEMMNQIKYKKDALANYPNFTSVVDPPEIVLAKINSVNQSDVKYKETFNKLIKGKYIFSPDTPYITHSKDMEKLYSTILYKRAWDGTKAYGYTLDERYIPIVGAKHADFVNSELKYKETYEKLKGHYLAGKEISEFPNVVHCLDFQKMRSLLNYRRHYEDTKANVHIPQDMMNHVLAKRCQYILSDLEYRHYFHQWTSLPEEPNVVRVRHAQEILSDNVYKDDLNWLKGIGCYVWDTPQILHAKKSYDLQSQILYTAAGKENLKNYNLVTDTPLYVTALQSGINASEVKYKENYHQTKDKYTTVLETVDYDRIKNLKDLFSSNLYKEAWDKVKATSYILPPNTVSLTHAKNQKYMASHIKYREEYEKFKALYTLPRSVEDDPNTARCLRVGKFNIDRLYRSVYEKNKMKIHIVPDMVEMVTAKDSQKKVSEIDYRLHLHEWICHPDLQVNSHVRKVTDQISDIVYKDDLTWLKGIGCYVWDTPEILHAKHAYDLRNDIKYKAHVLKTRNNYKLVTDTPVYVQAVKSGKQLSDAVYHYDYVHSIRGRVAPTTKTVDLDRALHAYKLQSENLYRKAGLHALPTGYRLPVDTPHFKHTKDTRYMSSYFKYKEVYEHMKAYGYTLGPNDVPFVNVRRVNNITSERLYRQLYHKLKDKIHTTPDTPEIRQVKKTQEAVSELIYKSDFFKMQGHMISLPYTPQVLHCRYVGDITSDIKYKEDLQVLRGMGCFLYDTPDMVRSRHLRKLWSHYLYTDKARKMRDKYKVVLDTPEYRKVQELKTHLSELVYRAAGRKQKSIFTSVPDTPDLTRAKRGQKLQSQYLYVELATKERPHHHAGNQTTALKHARHVKDMVSENKYKIQYEKMKDKYTPVPDTPILIRAKRAYWNASDLRYKETFQKTKGKYHTVKDALDIVYHRTVTDHISKIKYKENYMSQLGIWRSIPDRPEHFHHRAVTDAVSDVKYKQDLTWLKGIGCYAYDTPDFTLAEKNKTLYSKYKYKEVFERTKSNFKYVADCPINRHFKFATQLMNEKKYRADYEQRKDKYHLVVDEPRHLLAKIAGDQISQIKYRKNYEETKDKFTSIVDTPEHLRTTKVNKQISDILYKLEYNKAKPRGYTTIHDTPMLLHVRKVKDEVSDLKYKEVYQRTKSNCTIEPDAVHIKAAKDAYKVNTNLDYKKKYEATKAYWKWTPDRPDFIQAAKSTLQQSDFEYKLDREYLKGCKLSVTDDKDMVLALKNSIIESDLKYKEKHVKERGSCHAVPDTPQILLAKTVSSLVSENKYKSYVKKHLAQGSYTTLPETRDTIHVKEVTKNVSDTNYKKKFVKEKGKSNYSIMLEPPDVKHAMDVAKKQSNVAYKKDAKENLHYTTVADRPDIKKATQAAKQASEVEYRAKHRKEGSHGLSMLGRPDIEMAKKAAKLSSQVQYRENFNKEKGKTPKYNPKDSQLYKVMKDANTLASEVKYKADLKKLHKPVTDMKESLIMNHVLNTSHLASSYQYKKNYEKSKGHYHTIPDNLEQLHLKEATELQSIVKYKEKYEKERGKPMLDFETPTYITAKESQQMQSGKEYRKDYEESIKGRNLTGLEVTPALLHVKYATKIASEKEYRKDLEESIRGKGLSEMEDTPDMLRAKNATQILNEKEYKRDLELEVKGRGLNAMANETPDFLRARNATDIASQIKYKQSAEMEKANFTSVVDTPEIIHAQQVKNLSSQKKYKEDAEKCMSYYETVLDTPEMQRVRENQKNFSLLQYQYDLKNSKGKITVVQDTPEILRVKENQKNFSSVLYKEDVSPGTAIGKTPEMMRVKQTQDHISSVKYKEVIGQGTPIPDLPEVKRVKQTQKHISSVMYKENLGTGIPTPVTPEIERVKRNQENFSSVLYKENLGKGTPTPITPEMERVKRNQENFSSILYKENLSKGTPLPVTPEMERVKRNQENFSSVLYKENVGKGTPTPVTPEMQRVKRNQENISSVLYKENLGKATPTPFTPEMERVKRNQENFSSVLYKENMRKATPTPVTPEMERAKRNQENISSVLYSDSFRKQIQGKAAYVLDTPEMRRVRETQRHISTVKYHEDFEKHKGCFTPVVTDPITERVKKNTQDFSDICYRGIQRKVVEMEQKRNDQDQETITGLRVWRTNPGSVFDYDPAEDNIQSRSLHMINAQAQRRSREQSRSASGLSISGGEEKSEHSEAAHLSTYSDGGVFFSAASTGYKHARTTELPQQRSSSVATQQTTVSSIPSHPSTAGKIFRAMYDYMAADADEVSFKDGDAIVNVQAIDEGWMYGTVQRTGRTGMLPANYVEAI

SEQ ID NO: 94 - protein, 499 aa, Bos taurus
MFNYERPKHFIQSQNPCGSRLQPPGPEISSYSSQTKQSSITIQPRQCTEQRYSASSTVSSHITMSSSAFPASPQQLAGSNPAQRVTATYNQSPASFLSSILPSQPDYSSSKNPSTVDSNYQQPSVGQPINVKSSQNANAKLTPKTPDHEIQGSKEALIQDLERKLKCKDSLLHNGNQRLTYEEKMARRLLGPQNAAAVFQGQNDSEAQDSAQQHNIEHARLQVPTSQVRSRSSSRGDVNDQDAIQEKFYPPRFIQVPENMSIEEGRFCRMDFKVSGLPAPDVSWYLNGRPVQSDDFHKMIVSEKGFHSLIFEVVRASDAGAYACVAKNRAGEATFTVQLDVLAKEHRRAPMFIYKPQSKKVFEGESVKLECQISAVPPPKLFWKRNNEMVQFNTDRISLYHDNSGRVTLLIKDVNKKDAGWYTVSAVNEAGVTTCNTRLDVTARPNQTLPAPKQLRVRPTFSKYLALNGKGLNVKQAFNPEGEFQRLAAQSGLYESEEL

SEQ ID NO: 95 - protein, 513 aa, Gallus gallus
MSVRNLPSVSSMCQPTMFNYERPKHFIQSKNVCQGQQQPPGSSTSTESSRQIKQSSILIQPRNPSGQKFSSSSSLSSSITLSSPSCSAPKESTYPVTPASAQSPASSSSGQRLISMPNQTPAAFLCSVLPSQPDYNSQTPPMEPHYSKPMYKKQASINSMQKTSDQEIRGTKEALIQDLEKKLRCKDNLLQNGNQRLTYEERMARRLLGPENAASVLEAQSEDMQNTQNAENVRLQVPTTHVRSRPSSRGDERGHDSIQEKFFQPRFTQVPEDVIIEEGRFCRLDFKVSGLPTPDVMWYQNGRMVHQDQFHKMIVSEKGFHSFIFEAVKSSDAGTYECVAVNRAGESSFAVKVEVIAKEHHTPPTFIFKPQSKKVFEGDTARLECQISAIPTPRIYWKRNNEMVQYNTDRISLLHDNTGRICLLIHNANKKDAGWYTVSAVNGAGVATCHARLEVATHTNKPVPAPKQLRVRPTFSKYLALNGRGLDVKQAFSPEGEFQRLAEQSGLYESDEL

SEQ ID NO: 96 - protein, 499 aa, Sus scrofa
MFNYERPKHFIQSQNPCGSRLQPPGPETSSYSSQTKQSSIIIQPRQCTEQRFSASSTVSSHITMSSSAFPASPQQPAASNPGQRVTATYNQSPASFLSSILPSQPDYSSSKIPSTMDSNYQQPSVGQPVNAKPSQSLNAKPIPRTPDHEIQGSKEALIQDLERKLKCKDSLLHNGNQRLTYEEKMARRLLGPQNAAAVFQAQNDSAAQDSPQQHNSEHARLQVPTSQVRSRSSSRGDVNDQDAIQEKFYPPRFIQVPENMSVEEGRFCRMDFKVSGLPAPDVSWYLNGRPVQSDDLHKMIVSEKGFHSLIFEVVRASDAGAYACVAKNRAGEATFTVQLDVLAKEHRRAPMFIYKPQSKKVFEGDSVKLECQISAIPPPKLFWKRNNEMVQFNTDRISLYHDNSGRVTLLIKDVNKKDAGWYTVSAVNEAGVITCNTRLDVTARPNQTLPAPKQLRVRPTFSKYLALNGRGLDVKQAFNPEGEFQRLAAQSGLYESEEL

SEQ ID NO: 97 - protein, 349 aa, Sus scrofa
MAHQTGIHATEELKEFFAKARAGSVRLIKVVIEDEQLVLGASRELMGCWDQDYDRAVLPLLDAQQPCYLLYRLDTQNAQGFEWLFLAWSPDNSPVRLKMLYAATRATVKKEFGGGHIKDELFGTVKDDLSFAGYQKHLSSCAAPAPLTSAERELQQIRINEVKTEISVESKHQTLQGLAFPLQPQAQRALQQLRQKMINYIQLKLDLERETIELVHTEPTDVAQLPSRVPRDAARYHFFLYKHTHEGDPLESVVFIYSMPGYKCSIKERMLYSSCKSRLLDSVEQDFQLEIAKKIEIGDGAELTAEFLYDEVHPKQHAFKQAFAKPKGPGGKRGHKRLIRGPGENGDDS

SEQ ID NO: 98 - protein, 3679 aa, Bos taurus
MLWWEEVEDCYEREDVQKKTFTKWINAQFSKFGKQHIENLFSDLQDGRRLLDLLEGLTGQKLPKEKGSTRVHALNNVNKALQVLQKNNVDLVNIGSSDIVDGNHKLTLGLIWNIILHWQVKNVMKNIMAGLQQTNSEKILLSWVRQSTRNYPQVNVINFTTSWSDGLALNALIHSHRPDLFDWNSVVRQQSATQRLEHAFNIAKYQLGIEKLLDPEDVATTYPDKKSILMYVTSLFQVLPQQVSLEAIQEVEMLPRPSKVTREEHFQLHHQMHYSQQITVSLAQGYERTPSSPQPRFKSYAYTQAAYVSTSDPTRSPFPSQRLEAPEDKSFGSPLMETEVNLDSYQTALEEVLSWLLSAEDTLQAQGEISNDVEEVKEQFHTHEGYMMDLTSHQGRVGNVLQLGSQLIGSGKLSEDEETEVQEQMNLLNSRWECLRVASMEKQSNLHKVLMDLQNQQLKELNAWLTKTEERTRKMEKEPLGPDLEDLKRQIQQHKVLQEDLEQEQVRVNSLTHMVVVVDESSGDHATAALEEQLKVLGDRWANICRWTEDRWVLLQDVLLKWQRFTEEQCLFSTWLSDKEDALNKIPTSGFKDQSEMLSSLQKLAVLKTDLEKKKQTMDKLCSLNHDLLSTLKNTLVAQKMEAWLDNFAQRWDNLVQKLEKSSTQISQAVTTTQPSLTQTTVMETVTMVTTREQILVKHAQEELPPPPPQKKRQIIVDSEIKKRLDVDITELHSWITRSEAVLQSPEFAVYRKEGNFSDLKEKVNAIEREKAEKFRKLQDASRSAQALVEQMVNEGVNADSIKQASEQLNSRWIEFCQLLSERLNWLEYQNNIITFYNQLQQLEQMTTTAENWLKTQPTTPSEPTAVKSQLKNCKDEVNRLSALQPQIERLKIQSIALKEKGQGPMFLDADFVAFTNHFNQVFADMQAREKELQTILDTLPTVRYQETMSTILTWIQQSETKLSIPQVTVTEYEIMEQRLEELQALQSSLQEHQNDLNYLSTTVKEMSRKAPSHISQRYQSEFENIEGRWKKLSAQLNERCQKLEEQMAKLRKLQNHIKTLKKWMAEVDVFLKDEWPALGDSEILKKQLKQCRLLVSDIQTIQPSLNSVNEGGQKIKTEAEPEFASRLETELRELNTQWDYICRQVYARKEALKGGLDKTVSLQKDLSEMHEWMTQAEEEYLERDFEYKTPDELQTAVEEMKRAKEEAQQKEAKVQLLTESVNSVIAQAPPAAQEALRKELDTLTTNYQWLCTRLNGKCKTLEEVWACWHELLSYLEKANKWLNEVELKLKTTENIPGGAEEISEVLSSLENLMQHSEDNPNQIRILAQTLTDGGVMDELINEELETFNSRWRELHEEAVRRQKLLEQSIQSAQEIEKSLQLIQESLSSIDKQLAAYIADKVDAAQMPQEAQKIQSDLTSHEISLEEMKKHYQGKETAQRVLSQIEVAQKKMQDVSMKFRLFQKPANFEQRLQESKMILDEVKMHLPALETKSVEQEVVQSQLNHCVNLYKSLSEVKSEVEMVIKTGRQIVQKKQTENPKELDERVTALKLHYNELGAKVTERKQQLEKCLKLSRKMRKEMNALTEWLAATDLELTKRSAVEGMPSNLDSEVAWGKATQKETEKQKVHLKSITELGEALKTVLGKKETLVEDKLSLLNSNWIAVTSRAEEWLNLLLEYQKHMETFDQNVDHITKWIIQADALLDESEKKKPQQKEDMLKRLKAELNDIRPKVDSTRDQAANLMANRGDHCRKVIEPKISELNHRFAAISHRIKTGKASIPLKELEQFNSDIQKLLEPLEAEIQQGVNLKEEDFNKDMSEDNEGTVKELLQRGDNLQQRITDERKREEIKIKQQLLQTKHNALKDLRSQRRKKALEISHQWYQYKRQADDLLKCLDDIEKKLASLPEPRDERKIKEIDRELQKKKEELNAVHRQAEGLSEDGAAMAVESTQIQLSKRWREIESKFAQFRRLNFAQIHTVHEESVMVMTEDMPLEISYVPSTYLTEITHVLQALSEVEQLLNAPDLCAKDFQDLFKQEESLKNIKDNLQQISGRIDVIHNKKAAALQSTTPPEKARLQEALSRLDFQWERVNKMYKDRQGQFDRSVEKWRRFHYDMKIFNQWLTEAEHFLKKTQIPENWEHAKYKWYLKELQDGIGQRQTVVRVLNATGEEIIQQSSKIDASILQEKLGSLNLRWQEVCKQLAERKKRLEEQKNILSEFQRDLNEFVLWLEEAGNISSIPLEPGNEQQLKEKLEEVKLLAEELPLRQGILKQLNETGGTVLVSAPISPEEQDKLENKLKQTNLQWIKVSRSLPEKQGEIEAHIKDLGQLEEQLNHLLLWLSPIRSQLEIYNQPNQTGPFDIKETEVAVQAKQPDVEGILSKGQNLYKEKPATEPVKRKLEDLSSEWKAVTHLLQELRAKWPGPVPGLTATGAPPSQTVALVTQPVVAKETAVSKLEMPSSLLLEVPALADFNRAWTELTDWLSLLDRVLKAQRVMVGDLEDINEMIIKQKATLQDLEQRRPQLEELITAAQNLKNKTSNQEARTIITDRIERIQSQWDEVQEHLQNRRQQLNEMLKDSTQWLEAKEEAEQVVGQARAKLETWKEGPYTMDAIQRKITETKQLAKDLRQWQINVDVANDLALKLLRDYSADDTRKVHMITENINASWASIHKRVSERETALEETHRLLQQFPLDLEKFLAWLTEAETTANVLQDATHKERLLEDSKGVRELMKQWQDLQGEIEAHTDIYHNLDENGQKILRSLEGSDDAVLLQRRLDNMNFKWSELRKKSLNIRSHLEASSDQWKRLHLSLQELLVWLQLKDDELSRQAPIGGDFPAVQKQNDIHRAFKRELKTKEPVIMSTLETVRIFLTEQPLEGLEKLYQEPRELPPEEKAQNVTRLLRKQAEEVNTEWEKLNLHSADWQRKIDEALERLQELQEATDELDLKLRQAEVIKGSWQPVGDLLIDSLQDHLEKVKALRGEIAPLKENVSHVSDLARQLTTLGIQLSPYNLSTLEDLNTRWKLLQVAVEDRIRQLHEAHRDFGPASQHFLSTSVQGPWERAISPNKVPYYINHETQTTCWDHPKMTELYQSLADLNNVRFSAYRTAMKLRRLQKALCLDLLSLSAACDALDQHNLKQNDQPMDILQIINCLTTIYDRLEQEHNNLVNVPLCVDMCLNWLLNVYDTGRTGRIRVLSFKTGIISLCKAHLEDKYRYLFKQVASSTGFCDQRRLGLLLHDSIQIPRQLGEVASFGGSNIEPSVRSCFQFANNKPEIEAALFLDWMRLEPQSMVWLPVLHRVAAAETAKHQAKCNICKECPIIGFRYRSLKHFNYDICQSCFFSGRVAKGHKMHYPMVEYCTPTTSGEDVRDFAKVLKNKFRTKRYFAKHPRMGYLPVQTVLEGDNMETPVTLINFWPVDSAPASSPQLSHDDTHSRIEHYASRLAEMENSSGSYLNDSISPNESIDDEHLLIQHYCQSLNQDSPLSQPRSPAQILISLESEERGELERILADLEEENRNLQAEYDRLKEQHEHKGLSPLPSPPEMMPTSPQSPRDAELIAEAKLLRQHKGRLEARMQILEDHNKQLESQLHRLRQLLEQPQAEAKVNGTTVSSPSTSLQRSDSSQPMLLRVVGSQTSESMGEEDLLSPPQDSSTGLEEVMEQLNNSFPSSRGRNTPGKPMREDTM

SEQ ID NO: 99 - protein, 395 aa, Bos taurus
MSAADRMGARAVPGLRLALLLLMVLGTPKSGVQGEEGLDFPEYDGVDRVVNVNAKNYKNVFKKYEVLALLYHEPPEDDKASQRQFEMDELILELAAQVLEDKGVGFGMVDSEKDAAVAKKLGLTEEDSVYVFKGDEVIEYDGEFSADTLVEFLLDVLEDPVELIEGERELQAFENIEDDNKLIGYFKNKDSEHYKAYEDAAEEFHPYIPFFATFDSKVAKKLTLKLNEIDFYEAFMEEPVTIPDKPNSEEEIVSFVEAHKRSTLRKLKPESMYETWEDDLDGIHIVAFAEETDPDGYEFLETLKAVAQDNTDNPDLSIIWIDPDDFPLLVPYWEKTFNIDLSAPQIGVVNVTDADSVWMEMDDEEDLPSAEELEDWLEDVLEGEINTEDDDEEDD

SEQ ID NO: 100 - protein, 377 aa, Gallus gallus
MCDDEETTALVCDNGSGLVKAGFAGDDAPRAVFPSIVGRPRHQGVMVGMGQKDSYVGDEAQSKRGILTLKYPIEHGIITNWDDMEKIWHHTFYNELRVAPEEHPTLLTEAPLNPKANREKMTQIMFETFNVPAMYVAIQAVLSLYASGRTTGIVLDSGDGVTHNVPIYEGYALPHAIMRLDLAGRDLTDYLMKILTERGYSFVTTAEREIVRDIKEKLCYVALDFENEMATAASSSSLEKSYELPDGQVITIGNERFRCPETLFQPSFIGMESAGIHETTYNSIMKCDIDIRKDLYANNVLSGGTTMYPGIADRMQKEITALAPSTMKIKIIAPPERKYSVWIGGSILASLSTFQQMWISKQEYDEAGPSIVHRKCF

SEQ ID NO: 101 - protein, 291 aa, Gallus gallus
MVREQYTTTTPGTSLERPKNEYVYKIGIYGWRKRCLYLFVLLLLIILVVNFSLTIWILKVMWFSPTGMGHLRVTKEGLRLEGESEFLFPLYAKEIHSRVDSSLLLQSTHNVTVNARNSNGEVTGRLNVGPKMVEFHGQQFQINSKDGKPLFTVDENEVVIGTDKLRVTGPEGALFEHSVETPLVKAEAFKQLRLESPTRSLSMDAPRGINIKAQAGNIEALSQMDIKLHSSDGVLLLDAETVRLPKLPEGTRGGPGVSQGLYEICVCPDGKLYLSVAGLGSTCQEYSRVCQ

SEQ ID NO: 102 - protein, 1937 aa, Gallus gallus
MMDMTEFGEAAPFLRKSEKELMMLQTVAFDGKKKCWVPDDKKAYVEAEITESSGGKVTVETTDGRTMTIKEDDVQSMNPPKFDMIEDMAMLTHLNEASVLYNLRKRYSNWMIYTYSGLFCVTINPYKWLPVYKSEVVAAYKGKRRSEAPPHIFSIADNAYHDMLRNRENQSMLITGESGAGKTVNTKRVIQYFATVAALGEPGKKSQPATKTGGTLEDQIIQANPALEAFGNAKTLRNDNSSRFGKFIRIHFGTTGKLSSADIEIYLLEKSRVIFQQPGERDYHIFYQILSGKKPELLDMLLVSTNPYDYHFCSQGVVTVDNLDDGEELMATDQAMDILGFVPDEKYGAYKLTGAIMHFGNMKFKQRPREEQAEADGTESADKAAYLMGINSSDLVKGLLHPRVKVGNEYVTKGQSVEQVLYAVGALSKAVYDRMFKWLVVRINKTLDTKLPRQFFIGVLDIAGFEIFDFNSFEQLCINYTNEKLQQFFNHHMFVLEQEEYKKEGIEWVFIDFGMDLQACIDLIEKPLGILSILEEECMFPKATDMTFKAKLYDNHLGKSPNLQKPRPDKKRKYEAHFELIHYAGSVPYNIIGWLEKNKDPLNETVVGIFQKSSNKLLASLFESYVGADSADQGGEKKRKKGASFQTVSSLHKENLNKLMTNLRSTAPHFVRCIIPNESKTPGEMDAFLVLHQLRCNGVLEGIRICRKGFPNRVLYADFKQRYRILNPGAIPEDKFVDSRKAAEKLLASLDIDHNQYRFGHTKVFFKAGLLGHLEEMRDERLAKILTMIQARARGRLMRIEFQKIVERRDALLVIQWNIRAFMAVKNWPWMKLFFKIKPLLKSAETEKEMANMKEEFLKLKEALEKSEARRKELEEKQVSLVQEKNDLLLQLQAEQDTLADAEERCDLLIKSKIQLEAKVKELTERVEDEEEMNSELTSKKRKLEDECSELKKDIDDLEITLAKVEKEKHATENKVKNLTEEMATLDENISKLTKEKKSLQEAHQQVLDDLQAEEDKVNTLSKAKVKLEQQVDDLEGSLEQEKKVRMDLERAKRKLEGDLKLTQESVMDLENDKLQMEEKLKKKEFEMSQLNSKIEDEQAIVMQLQKKIKELQARIEELEEELEAERAARAKVEKQRSDLARELEVLSERLEEAGGATAAQLEMNKKREAEFLKLARDLEEATLHYEATAAALRKKHADSVAEMGEQLDNLQRVKQKLEKEKSELKMEVDDLTSNMEQTVKGKANAEKLCRTYEDHLNETKTKLDEMTRLMNDLTTQKTKLQSENGEFVRQLEEKESLISQLSRGKTSFTQQIEELRRQLEEETKSKNALAHALQAARHDCDLLREQYEEEQEAKAELQRALSKGNAEVAQWRTKYETDAIQRTEELEDAKKKLAARLQEAEEAIEAANAKCSSLEKTKHRLQNELEDMMIDLEKANSAAASLDKKQRGFDKIINDWKQKYEESQAELEASQKEARSLSTELFKLKNAYEETLDHLETLKRENKNLQEEISDLTNQISEGNKNLHEIEKVKKQVEQEKSEVQLALEEAEGALEHEESKTLRFQLELSQLKADFERKLAEKDEEMENIRRNQQRTIDSLQSTLDSEARSRNEAIRLKKKMEGDLNEMEIQLSHANRHAAEATKSARGLQTQIKELQVQLDDLGHLNEDLKEQLAVSDRRNNLLQSELDELRALLDQTERARKLAEHELLEATERVNLLHTQNTSLINQKKKLEGDISQMQNEVEESIQECRNAEEKAKKAITDAAMMAEELKKEQDTSAHLERMKKNMEQTIKDLQKRLDEAEQIALKGGKKQIQKLESRVRELENELENELRRNSDAQKGARKFERRIKEVTYQSEEDKKNLARMQDLIDKLQLKVKSYKHQAEEAEAQANLYLSKYRKQQHDLDDAEERAEIAESQVNKLRSKSRDIGMKKVHEEE

SEQ ID NO: 103 - protein, 1272 aa, Gallus gallus
MPEPAKKAVSAFTKKPKTTEVAAGSTAVFEAETEKTGIKVKWQRAGTEITDSEKYAIKAEGNKHSLTISNVGKDDEVTYAVIAGTSKVKFELKVKEPEKSEPVAPAEASPAPAASELPAPPVESNQNPEVPPAETQPEEPVDPIGLFVTRPQDGEVTVGGNITFTAKVAGESLLKKPSVKWFKGKWMDLASKVGKHLQLHDNYDRNNKVYTFEMEIIEANMTFAGGYRCEVSTKDKFDSSNFNLIVNEAPVSGEMDIRAAFRRTSLAGGGRRMTSAFLSTEGLEESGELNFSALLKKRDSFLRTANRGDGKSDSQPDVDVWEILRKAPPSEYEKIAFQYGITDLRGMLKRLKRIKKEEKKSTAFLKKLDPAYQVDKGQKIKLMVEVANPDADVKWLKNGQEIQVSGSKYIFEAIGNKRILTINHCSLADDAAYECVVAEEKSFTELFVKEPPILITHPLEDQMVMVGERVEFECEVSEEGATVKWEKDGVELTREETFKYRFKKDGKKQYLIINESTKEDSGHYTVKTNGGVSVAELIVQEKKLEVYQSIADLTVKARDQAVFKCEVSDENVKGIWLKNGKEVVPDERIKISHIGRIHKLTIEDVTPGDEADYSFIPQGFAYNLSAKLQFLEVKIDFVPREEPPKIHLDCLGQSPDTIVVVAGNKLRLDVPISGDPTPTVIWQKVNKKGELVHQSNEDSLTPSENSSDLSTDSKLLFESEGRVRVEKHEDHCVFIIEGAEKEDEGVYRVIVKNPVGEDKADITVKVIDVPDPPEAPKISNIGEDYCTVQWQPPTYDGGQPVLGYILERKKKKSYRWMRLNFDLLKELTYEAKRMIEGVVYEMRIYAVNSIGMSRPSPASQPFMPIAPPSEPTHFTVEDVSDTTVALKWRPPERIGAGGLDGYIVEYCKDGSAEWTPALPGLTERTSALIKDLVTGDKLYFRVKAINLAGESGAAIIKEPVTVQEIMQRPKICVPRHLRQTLVKKVGETINIMIPFQGKPRPKISWMKDGQTLDSKDVGIRNSSTDTILFIRKAELHHSGAYEVTLQIENMTDTVAITIQIIDKPGPPQNIKLADVWGFNVALEWTPPQDDGNAQILGYTVQKADKKTMEWYTVYDHYRRTNCVVSDLIMGNEYFFRVFSENLCGLSETAATTKNPAYIQKTGTTYKPPSYKEHDFSEPPKFTHPLVNRSVIAGYNTTLSCAVRGIPKPKIFWYKNKVDLSGDAKYRMFSKQGVLTLEIRKPTPLDGGFYTCKAVNERGEAEIECRLDVRVPQ

SEQ ID NO: 104 - protein, 1271 aa, Gallus gallus
MPEPAKKAVSAFTKKPKTTEVAAGSTAVFEAETEKTGIKVKWQRAGTEITDSEKYAIKAEGNKHSLTISNVGKDDEVTYAVIAGTSKVKFELKVKEPEKSEPVAPAEASAPAASELPAPPVESNQNPEVPPAETQPEEPVDPIGLFVTRPQDGEVTVGGNITFTAKVAGESLLKKPSVKWFKGKWMDLASKVGKHLQLHDNYDRNNKVYTFEMEIIEANMTFAGGYRCEVSTKDKFDSSNFNLIVNEAPVSGEMDIRAAFRRTSLAGGGRRMTSAFLSTEGLEESGELNFSALLKKSSSFLRTANRGDGKSDSQPDVDVWEILRKAPPSEYEKIAFQYGITDLRGMLKRLKRIKKEEKKSTAFLKKLDPAYQVDKGQKIKLMVEVANPDADVKWLKNGQEIQVSGSRYIFEAIGNKRILTINHCSLADDAAYECVVAEEKSFTELFVKEPPILITHPLEDQMVMVGERVEFECEVSEEGATVKWEKDGVELTREETFKYRFKKDGKKQYLIINESTKEDSGHYTVKTNGGVSVAELIVQEKKLEVYQSIADLTVKARDQAVFKCEVSDENVKGIWLKNGKEVVPDERIKISHIGRIHKLTIEDVTPGDEADYSFIPQGFAYNLSAKLQFLEVKIDFVPREEPPKIHLDCLGQSPDTIVVVAGNKLRLDVPISGDPTPTVIWQKVNKKGELVHQSNEDSLTPSENSSDLSTDSKLLFESEGRVRVEKHEDHCVFIIEGAEKEDEGVYRVIVKNPVGEDKADITVKVIDVPDPPEAPKISNIGEDYCTVQWQPPTYDGGQPVLGYILERKKKKSYRWMRLNFDLLKELTYEAKRMIEGVVYEMRIYAVNSIGMSRPSPASQPFMPIAPPSEPTHFTVEDVSDTTVALKWRPPERIGAGGLDGYIVEYCKDGSAEWTPALPGLTERTSALIKDLVTGDKLYFRVKAINLAGESGAAIIKEPVTVQEIMQRPKIWLPRHLRQTLVKKVGETINIMIPFQGKPRPKISWMKDGQTLDSKDVGIRNSSTDTILFIRKAELHHSGAYEVTLQIENMTDTVAITIQIIDKPGPPQNIKLADVWGFNVALEWTPPQDDGNAQILGYTVQKADKKTMEWYTVYDHYRRTNCVVSDLIMGNEYFFRVFSENLCGLSETAATTKNPAYIQKTGTTYKPPSYKEHDFSEPPKFTHPLVNRSVIAGYNTTLSCAVRGIPKPKIFWYKNKVDLSGDAKYRMFSKQGVLTLEIRKPTPFDGGFYTCKAVNERGEAEIECRLDVRVPQ

SEQ ID NO: 105 - protein, 208 aa, Gallus gallus
MAEEEEPKPPPLRRKSSANYRGYAVEPHAKRQSKISASRKLQLKTLLLQRAKRELEREEQERAGEKQRHLGELCPPPELEGLGVAQLQELCRELHARIGRVDEERYDMGTRVSKNMAEMEELRRRVAGGRFVRPALRRVRLSADAMMAALLGSKHRVGTDLRAGLRQVRKDDAEKESREVGDWRKNVDALSGMEGRKKKFEAPGGGQG

SEQ ID NO: 106 - protein, 219 aa, Gallus gallus
MKQKHQEKGESKPKPKPFMPNLVPPKIPDGERLDFDDIHRKRMEKDLNELQALIEAHFESRKKEEEELISLKDRIEQRRAERAEQQRIRSEREKERQARMAEERARKEEEEARKKAEEEARKKKAFSNMLHFGGYMQKSEKKGGKKQTEREKKKKILSERRKPLNIDHLSEDKLRDKAKELWQTIRDLEAEKFDLQEKFKRQKYEINVLRNRVSDHQKV

SEQ ID NO: 107 - protein, 197 aa, Sus scrofa
MPPKKPEPKKEAAKAAPAPAPAPAPAPAPPPEPAKEPTFDPKSIKIDFTADQIEEFKEAFSLFDRTPTGEMKITYGQCGDVLRALGQNPTNAEVLRVLGKPKPEEMNAKMLDFETFLPILQHISRNKEQGTYEDFVEGLRVFDKESNGTVMGAELRHVLATLGEKMTEAEVEQLLAGQEDANGCINYEAFVKHIMSG

SEQ ID NO: 108 - protein, 1931 aa, Gallus gallus
MEALLGAAAPFLRAPEGPRPTPAGDTRGLCFVPHPQLEFIRARVTARAGNGVTVTTEMGETLTVPEADVHPQNPPKFDRIEDMAMLTFLHEPAVLYNLKERYASWMIYTYSGLFCVTVNPYKWLPVYNAEVVAAYRGKKRTEVPPHIFSISDNAYQNMLTDRENQSILITGESGAGKTVNTKRVIQYFASIAAIGHRKKEVANSSKGTLEDQIIQANPALEAFGNAKTVRNDNSSRFGKFIRIHFGATGKLASADIETYLLEKSRVIFQLKAERNYHIFYQILSNKKPELLEMLLITNNPYDYSYVSQGEVTVASIDDSEELLATDSAFDVLGFTAEEKAGVYKLTGAIMHFGNMKFKQKQREEQAEPDGTEDCDKSAYLMGLNSADLLKGLCHPRVKVGNEYVTKGQSVQQVYYSIGALAKAVYEKMFNWMVVRINNSLETKQPRQYFIGVLDIAGFEIFDFNSFEQLCINFTNEKLQQFFNHHMFVLEQEEYKKEGIEWEFIDFGMDLQACIDLIEKPMGIMSILEEECMFPKASDMTFKAKLFDNHLGKSANFGKPRNVKGKSEAHFSLIHYAGTVDYNIIGWLEKNKDPLNETVVGLYQKSALKLLASLFSNYAGADAGGDGGKGKGAKKKGSSFQTVSALHRENLNKLMANLKTTHPHFVRCLIPNERKEPGVMDNPLVMHQLRCNGVLEGIRICRKGFPNRILYGDFRQRYRIPNPTAIPEGQFIDSRKGAEKLLGSLDIDHNQYKFGHTKVFFKAGLLGLLEEMRDERLSLIITRIQAQARGQLMRIEFKKILERRDALLVIQWNIRAFMGVKNWPWMKLYFKIKPLLKSAETEKEMQTMKEEFGHLKEALEKSAARRKELEEKMVSMLQEKNDLQLQVQAEQDNLADAEERCDQLIKNKIQLEAKVKEMTERLEEEEEMNAELAAKKRKLEDECSELKKDIDDLELSLAKVEKEKHATENKVKNLTEEMAGLDENITKLTKEKKILQESHQQALDDLQAEEDKVNTLAKAKGKLEQQVDDLESSLEQEKKIRMDLERAKRKLEGDLKLAQESIMDLENDKQQLEERLKKKDFELNTLNARIEDEQAISAQLQKKLKELQARIEELEEELEAERTGRAKVEKLRSELLQELEETSERLEEAGGATSVQLELNKKREAEFQKLRRDLEEATLQHEATAATLRKKHADSVAELSEQLDNLQRVKQKLEKEKSELKLELDDVNSNTEQLIKAKTNLEKMCRTTEDQMNEHRSKLEEAQRTVTDLSTQRAKLQTENSELSRQLEEKEAFINQLTRGKLTYTQQLEDLKRQLEEEAKAKNALAHALQSAQHDCDLLREQYEEEMEAKAELQRALSKANSEVAQWRTKYETDAIQRTEELEEAKKKLAQRLQEAEEAVEAVNAKCSSLEKTKHRLQNEIEDLMADVERSNAAAAALDKKQRNFDKILSEWKQKFEESQTELEASQKEARSLSTELFKLKNAYEESLEHLETFKRENKNLQEEILDLTEQLGASQKSIHELEKVRKQLDAEKLELQAALEEAEASLEHEEGKILRAQLEFNQVKADYERKLAEKDEEIEQSKRNHLRVVDSLQTSLDAETRSRNEALRLKKKMEGDLNEMEIQLSHANRTAAEAQKQVKALQGYLKDTQLQLDDVVRANEDLKENIAIVERRNNLLQSELEELRAMVEQSERARKLAEQELIEASERVQLLHSQNTSLINQKKKMEADISQLQTEVEEAIQECRNAEEKAKKAITDAAMMAEELKKEQDTSAHLERMKKNMEQTVKDLQLRLDEAEQLALKGGKKQLQKLEVRVRELENELEAEQKRNAESIKGLRKSERRVKELSYQTEEDRKNMVRLQDLVDKLQLKVKAYKRQAEEAEEQANSNLAKFRKVQHELDEAEERADMAESQVNKLRARSRDIGAKKGLNEE

SEQ ID NO: 109 - protein, 1941 aa, Gallus gallus
MSMLDMSEFGEAAEYLRKSYTEQLKLQTIPFDGKKRAWIPDEKEAYIEVEIKESTGGKVTVETKDKQTRVVKEDELQAMNPPKFDMIEDMAMLTHLNEASVLYNLKRRYSHWMIYTYSGLFCVTINPYKWLPVYTAPVVAAYKGKRRSEAPPHIYSIADNAYNDMLRNRENQSMLITGESGAGKTVNTKRVIQYFAIVAALGDTPGKKVAALATKTGGTLEDQIIEANPAMEAFGNAKTIRNDNSSRFGKFIRIHFGPSGKLASADIDIYLLEKSRVIFQQPKERSYHIYYQILSGKKPELQDMLLLSLNPYDYHFCSQGVTTVDNLDDGEELMATDHAMDILGFSNDEKYGSYKIVGAIMHFGNMKFKQKQREEQAEADGTESADKAAYLMGISSADLIKGLLHPRVKVGNEYVTKGQNVEQVVYAVGALAKATYDRMFKWLVTRINKTLDTKLARQFFIGVLDIAGFEIFDFNSFEQLCINFTNEKLQQFFNHHMFVLEQEEYKKEGIEWVFIDFGLDLQACIDLIEKPLGILSILEEECMFPKASDMSFKAKLYDNHLGKSPNFQKPRPDKKRKYEAHFELVHYAGVVPYNIIGWLDKNKDPLNETVVAVFQKSQNKLLASLYENYVGSSSEEPHKPGSKEKRKKAASFQTVSQLHKENLNKLMTNLRSTQPHFVRCIIPNETKTPGAMDAFLVLHQLRCNGVLEGIRICRKGFPNRILYADFKQRYRILNPAAIPDDKFVDSRKATEKLLSSLELDHSQYKFGHTKVFFKAGLLGMLEEMRDERLAKILTMLQARIRGHLMRIEYQKIISRREALYTIQWNIRAFNAVKNWSWMKLFFKIKPLLKSAQTEKEMSTLKEEFQKLKEALEKSEAKRKELEEKQVSMIQEKNDLALQLQAEQDNLADAEERCDLLIKSKIQLEAKVKELTERVEDEEEMNADLTAKKRKLEDECAELKKDIDDLEITLAKVEKEKHATENKVKNLIEEMAALDEIIAKLTKEKKALQEAHQQALDDLQAEEDKVNTLTKAKVKLEQQVDDLESSLEQEKKIRMDLERAKRKLEGDLKLTQESVMDLENDKQQLEEKLKKKDFEMSQLNSRIEDQQVTEAQLQKKIKELQARIEELEEELEAERAARAKVEKQRAEVSRELEELSERLEEAGGATSAQLEMNKKREVEFLKLRRDLEEATLQHESTAAALRKKHADSVAELSEQIDNLQRVKQKLEKEKSEMKMEVDDLSSNIEYLTKNKANAEKLCRTYEDQLSEAKSKVDELQRQLTDVSTQRGRLQTENGELSRLLEEKESFINQLSRGKTSFTQTIEELKRQLEEETKSKNALAHALQASRHDCDLLREQYEEEVEAKSELQRNLSKANAEVAQWRTKYETDAIQRTEELEEAKKKLAIRLQEAEEAVEAAHAKCSSLEKTKHRLQTEIEDLSVDLERANSACAALDKKQRNFDRILAEWKQKYEETQAELEASQKESRSLSTELFKLKNAYEESLDNLETLKRENKNLQEEIADLTDQISMSGKTIHELEKLKKALENEKSDIQAALEEAEGALEHEESKTLRIQLELNQIKADVDRKLAEKDEEFENLRRNHQRAMDSMQATLDAEARAKNEAVRLRKKMEGDLNEMEIQLSHANRQAAEFQKLGRQLQAQIKDLQIELDDTQRQNDDLKEQAAALERRNNLLLAEVEELRAALEQAERSRKLAEQELLEATERVNLLHSQNTGLINQKKKLETDISQLSSEVEDAVQECRNAEEKAKKAITDAAMMAEELKKEQDTSAHLERMKKNMEQTIKDLQMRLDEAEQIALKGGKKQIQKLEARVRELEGELDMEQKKMAEAQKGIRKYERRIKELSYQTEEDRKNLTRMQDLIDKLQSKVKSYKRQFEEAEQQANSNLVKYRKVQHELDDAEERADIAETQVNKLRARTKEVITFKHE

SEQ ID NO: 110 - protein, 1935 aa, Sus scrofa
MVDAEMAAFGEAAPYLRKSEKERLEAQTRPFDLKKDVYVPDDKEEFVKAKILSREGGKVTAETEHGKTVTVKEDQVLQQNPPKFDKIEDMAMLTFLHEPAVLYNLKERYASWMIYTYSGLFCVTINPYKWLPVYNAEVVAAYRGKKRSEAPPHIFSISDNAYQYMLTDRENQSILITGESGAGKTVNTKRVIQYFAVIAAIGDRSKKEQTPGKGTLEDQIIQANPALEAFGNAKTVRNDNSSRFGKFIRIHFGATGKLASADIETYLLEKSRVIFQLKAERDYHIFYQILSNKKPELLDMLLITNNPYDYAFISQGETTVASIDDAEELMATDNAFDVLGFTSEEKNSMYKLTGAIMHFGNMKFKLKQREEQAEPDGTEEADKSAYLMGLNSADLLKGLCHPRVKVGNEYVTKGQNVQQVMYATGALAKAVYEKMFNWMVTRINTTLETKQPRQYFIGVLDIAGFEIFDFNSFEQLCINFTNEKLQQFFNHHMFVLEQEEYKKEGIEWEFIDFGMDLQACIDLIEKPMGIMSILEEECMFPKATDMTFKAKLYDNHLGKSNNFQKPRNIKGRPEAHFALIHYAGTVDYNIIGWLQKNKDPLNETVVDLYKKSSLKLLSNLFANYAGADTPVEKGKGKAKKGSSFQTVSALHRENLNKLMTNLRSTHPHFVRCIIPNETKSPGVIDNPLVMHQLRCNGVLEGIRICRKGFPNRILYGDFRQRYRILNPAAIPEGQFIDSRKGAEKLLGSLDIDHNQYKFGHTKVFFKAGLLGLLEEMRDERLSRIITRIQAQSRGVLSRMEFKKLLERRDSLLIIQWNIRAFMSVKNWPWMKLYFKIKPLLKSAETEKEMATMKEEFGRLKEALEKSEARRKELEEKMVSLLQEKNDLQLQVQAEQDNLADAEERCDQLIKNKIQLEAKVKEMTERLEDEEEMNAELTAKKRKLEDECSELKRDIDDLELTLAKVEKEKHATENKVKNLTEEMAGLDEIIAKLTKEKKALQEAHQQALDDLQAEEDKVNTLTKAKVKLEQHVDDLEGSLEQEKKVRMDLERAKRKLEGDLKLTQESIMDLENDKQQLDERLKKKDFELNALNARIEDEQALGSQLQKKLKELQARIEELEEELEAERTARAKVEKLRSDLSRELEEISERLEEAGGATSVQIEMNKKREAEFQKMRRDLEEATLQHEATAAALRKKHADSVAELGEQIDNLQRVKQKLEKEKSEFKLELDDVTSNMEQIIKAKANLEKMCRTLEDQMNEHRSKAEETQRSVNDLTSQRAKLQTENGELSRQLDEKEALISQLTRGKLTYTQQLEDLKRQLEEEVKAKNALAHALQSARHDCDLLREQYEEETEAKAELQRVLSKANSEVAQWRTKYETDAIQRTEELEEAKKKLAQRLQDAEEAVEAVNAKCSSLEKTKHRLQNEIEDLMVDVERSNAAAAALDKKQRNFDKILAEWKQKYEESQSELESSQKEARSLSTELFKLKNAYEESLEHLETFKRENKNLQEEISDLTEQLGSSGKTIHELEKVRKQLEAEKLELQSALEEAEASLEHEEGKILRAQLEFNQIKAEMERKLAEKDEEMEQAKRNHLRVVDSLQTSLDAETRSRNEALRVKKKMEGDLNEMEIQLSHANRMAAEAQKQVKSLQSLLKDTQIQLDDAVRANDDLKENIAIVERRNNLLQAELEELRAVVEQTERSRKLAEQELIETSERVQLLHSQNTSLINQKKKMEADLSQLQTEVEEAVQECRNAEEKAKKAITDAAMMAEELKKEQDTSAHLERMKKNMEQTIKDLQHRLDEAEQIALKGGKKQLQKLEARVRELENELEAEQKRNAESVKGMRKSERRIKELTYQTEEDRKNLLRLQDLVDKLQLKVKAYKRQAEEAEEQANTNLSKFRKVQHELDEAEERADIAESQVNKLRAKSRDIGTKGLNEE

SEQ ID NO: 111 - protein, 354 aa, Bos taurus
MEAATAPEAALRPTLKVKEASPADADGPQASPRRGTGSPLSQLLPPIEEHPKIWLPRALRQTYIRKVGDTVNLLIPFQGKPKPQAIWTRDGCALDTSRVSVRNGERDSILFIREAQRADSGRYQLSVQLGGLEATATIDILVIERPGPPQSIKLVDVWGSSATLEWTPPQDTGNAALLGYTVQKADTKSGLWFTVLERCRRASCTVPNLIVGNSYTFRVFAENQCGLSENAPITADLAHIQKAATVYRTEGFAQRDFSEAPKFTQPLADCTTVIGYDTQLFCCVRASPKPKIIWLKNKMDIQGNPKYRALTHLGICSLEIRKPGPFDGGIYTCKAVNPLGEASVDCRVDVKAPN

SEQ ID NO: 112 - protein, 471 aa, Sus scrofa
MSQAYSSSQRVSSYRRTFGGAPSFPLGSPLSSPVFPRAGFGTKGSSSSVTSRVYQVSRTSGGAGGLGPLRASRLGATRVPSSSYGAGELLDFSLADAVNQEFLTTRTNEKVELQELNDRFANYIEKVRFLEQQNAALAAEVNRLKGREPTRVAEIYEEELRELRRQVEVLTNQRARVDVERDNLLDDLQRLKAKLQEEIQLKEEAENNLAAFRADVDAATLARIDLERRIESLNEEIAFLKKVHEEEIRELQAQLQEQQVQVEMDMSKPDLTAALRDIRAQYETIAAKNISEAEEWYKSKVSDLTQAANKNNDALRQAKQEMMEYRHQIQSYTCEIDALKGTNDSLMRQMRELEDRFASEASGYQDNIARLEEEIRHLKDEMARHLREYQDLLNVKMALDVEIATYRKLLEGEESRINLPIQTFSALNFRETSPEQRGSEVHTKKTVMIKTIETRDGEVVSEATQQQHEVL

SEQ ID NO: 113 - protein, 566 aa, Sus scrofa
MSEHSRNSDQEEPFDREIDEDEILANLSPEELKELQSEMDVMAPDPRLPVGMIQKDQTDKPPTGNFDHKSLVDYMYWQKASRRMLEDERVPVTFVPSEEKPQEQRKEIDKGNKNMSQYLKEKLNNEIAAHKRESKSSDNEQETNDDDEDNEDDEDDEEDDAEDEEDEGDESDEKTKGEEEGEVKEPIRNGESNCQQVPNKAFEEQKDRPEAQEKFEKKISKLDPKKLALDTSFLKVSARPSGNQTDLDGSLRRVRQNDPDMKELNLNNIENIPKEMLLDFVNAMKKNKHIKTFSLANVGADESVAFALANMLRENRSITTLNIESNFITGKGIVAIMRCLQFNETLTELRFHNQRHMLGHHAEMEISRLLKANTTLLKMGYHFELPGPRMVVTNLLTRNQDKQRQKRQEEQKQQQLKEQKKLIAMLENGLGLPPGMWEMLGGPMPDSQMQEFLQPPPPKSLHPQTAPFSRRNEVMAKPAQPPKYRTDPDSFRVVKLKRIQRKSRMPEAREPPEKTNLKDVIKTLKPVPRNRPPPLVEITPRDQLLNDIRHSNIAYLKPVQLPKELA

SEQ ID NO: 114 - protein, 284 aa, Bos taurus
MDAIKKKMQMLKLDKENALDRAEQAEADKKAAEDRSKQLEDELVSLQKKLKATEDELDKYSEALKDAQEKLELAEKKATDAEADVASLNRRIQLVEEELDRAQERLATALQKLEEAEKAADESERGMKVIESRAQKDEEKMEIQEIQLKEAKHIAEDADRKYEEVARKLVIIESDLERAEERAELSEGKCAELEEELKTVTNNLKSLEAQAEKYSQKEDKYEEEIKVLSDKLKEAETRAEFAERSVTKLEKSIDDLEDELYAQKLKYKAISEELDHALNDMTSI

SEQ ID NO: 115 - protein, 284 aa, Gallus gallus
MEAIKKKMQMLKLDKENAIDRAEQAETDKKAAEDKCKQVEDELVALQKKLKGTEDELDKYSEALKDAQEKLEQAEKKATDAEGEVAALNRRIQLVEEELDRAQERLATALQKLEEAEKAADESERGMKVIENRAMKDEEKMEIQEMQLKEAKHIAEEADRKYEEVARKLVILEGELERAEERAEVSEVKCSDLEEELKNVTNNLKSLEAQSEKYSEKEDKYEEEIKILSDKLKEAETRAEFAERTVAKLEKSIDDLEDELYAQKLKYKAISEELDHALNDMTSL

SEQ ID NO: 116 - protein, 332 aa, Gallus gallus
MEAIKKKMQMLKLDKENALDRAEQAEAEQKQAEERSKQLEDELAAMQKKLKGTEDELDKYSEALKDAQEKLELAEKKAADAEAEVASLNRRIQLVEEELDRAQERLATALQKLEEAEKAADESERGMKVIENRALKDEEKMELQEIQLKEAKHIAEEADRKYEEVARKLVIIEGDLERTEERAELAESKCSELEEELKNVTNNLKSLEAQAEKYSQKEDKYEEEIKILTDKLKEAETRAEFAERSVAKLEKTIDDLEDELYAQKLKYKAISEELDHALNDMTSMARRALQESSFGEMGHLPWFPEPQRVYPVSGRVDFFSGMGGLTYGLKRT

SEQ ID NO: 117 - protein, 552 aa, Gallus gallus
MSTFGYRRELSKYEDIDEDELLASLTEEELKELERELEDIEPDRNLPVGQRQKSLTEKTPTGTFSREALMAYWERETRKLLEKERLGACEKDSEQEEDNSEDIQEECFTESNSEVSEEAYTEEDDEEEEEEEEEEEDEDDSDDEDEEKQNSAASERPVNCEDGRSSSHVRHKKCSNAKNSENLFNGHDGKDTENLSFKSSAIHPCGNPTVIEDALEKVRSNDPETTEVNLNNIENITSQMLIQFSQALRDNTVVKSFSLANTHADDNVAIAIAGMLKVNQHITSLNIESNFITGKGVLAIMRALQHNKVLTELRFHNQRHIMGSQVEMDIVKLLKENTTLVKLGYHFDLAGPRMSMTSILTRNMDKQRQKRMQEQRQQEYGCDGAINPKTKVLQKGTPRSSPYTSPKSSPWSSPKLPRKSAPAKSQPPAPAPPPPPPPPPPPPPPPPPVIPDKKAPTRNIAEVIKQQESSRKALQNGQKKKKGKKGKKHENSILKEIKDSLKSVSDRKSEEGSRPSTRPSTPQRSLHDNLMEAIRASSIKQLRRVEVPEALR

SEQ ID NO: 118 - protein, 365 aa, Sus scrofa
MPQNVILPGPAPWGFRLSGGIDFNQPLIITRITPGSKAAAANLCPGDVILAIDGYGTESMTHADAQDRIKAAAHQLCLKIDRAETRLWSPQVTEDGKAHPFKINLESEPQDVNYFEHKHNIRPKPFIIPGRSSGCSTPSGIDGGSGRSTPSSVSTLSTICPGDLKVAAKMAPNIPLEMELPGVKIVHAQFNTPMQLYSDDNIMETLQGQVSTALGETPSMSEPTTASVPPQSDVYRMLHDNRNEPTQPRQSGSFRVLQELVNDGPDDRPAGTRSVRAPVTKIHGGAGGTQKMPLCDKCGSGIVGAVVKARDKYRHPECFVCADCNLNLKQKGYFFVEGELYCETHARARMRPPEGYDTVTLYPKA

SEQ ID NO: 119 - protein, 431 aa, Bos taurus
MTPSKSSKAPFTFLPSAFLGKKHFAQMKRAHLFVVGVYLLSSCRAEEGLNFPTYDGKDRVVSLTEKNFKQVLKKYDLLCLYYHEPLSSDKVVQKQFQLKEIVLELVAQVLEHKDIGFVMVDAKKEAKLAKKLGFDEEGSLYILKGDRTIEFDGEFAADVLVEFLLDLIEDPVEIINSKLEVQAFERIEDHIKLIGFFKSEESEHYKAFEEAAEHFQPYIKFFATFDKGVAKKLSLKMNEVDFYEPFMDEPIAIPDKPYTEEELVEFVKEHQRPTLRRLRPEDMFETWEDDLNGIHIVAFAERSDPDGYEFLEILKQVARDNTDNPDLSIVWIDPDDFPLLVAYWEKTFKIDLFKPQIGVVNVTDADSVWMDIPDDDDLPTAEELEDWIEDVLSGKINTEDDDNDDEEDEDDDDDDDNSDEEDNDDSDDDDE

SEQ ID NO: 120 - protein, 377 aa, Gallus gallus
MCEEEDSTALVCDNGSGLCKAGFAGDDAPRAVFPSIVGRPRHQGVMVGMGQKDSYVGDEAQSKRGILTLKYPIEHGIITNWDDMEKIWHHSFYNELRVAPEEHPTLLTEAPLNPKANREKMTQIMFETFNVPAMYVAIQAVLSLYASGRTTGIVLDSGDGVTHNVPIYEGYALPHAIMRLDLAGRDLTDYLMKILSERGYSFVTTAEREIVRDIKEKLCYVALDFENEMATAASSSSLEKSYELPDGQVITIGNERFRCPETLFQPSFIGMESAGIHETTYNSIMKCDIDIRKDLYANNVLSGGTTMYPGIADRMQKEITALAPSTMKIKIIAPPERKYSVWIGGSILASLSTFQQMWISKQEYDEAGPSIVHRKCF

SEQ ID NO: 121 - protein, 376 aa, Gallus gallus
MCEEETTALVCDNGSGLCKAGFAGDDAPRAVFPSIVGRPRHQGVMVGMGQKDSYVGDEAQSKRGILTLKYPIEHGIITNWDDMEKIWHHSFYNELRVAPEEHPTLLTEAPLNPKANREKMTQIMFETFNVPAMYVAIQAVLSLYASGRTTGIVLDSGDGVTHNVPIYEGYALPHAIMRLDLAGRDLTDYLMKILTERGYSFVTTAEREIVRDIKEKLCYVALDFENEMATAASSSSLEKSYELPDGQVITIGNERFRCPETLFQPSFIGMESAGIHETTYNSIMKCDIDIRKDLYANNVLSGGTTMYPGIADRMQKEITALAPSTMKIKIIAPPERKYSVWIGGSILASLSTFQQMWISKPEYDEAGPSIVHRKCF

SEQ ID NO: 122 - protein, 172 aa, Gallus gallus
MSSKRAKTKTTKKRPQRATSNVFAMFDQSQIQEFKEAFNMIDQNRDGFIDKEDLHDMLASLGKNPTDEYLDAMMNEAPGPINFTMFLTMFGEKLNGTDPEDVIRNAFACFDEEATGFIQEDYLRELLTTMGDRFTDEEVDELYREAPIDKKGNFNYIEFTRILKHGAKDKDD

SEQ ID NO: 123 - protein, 1979 aa, Gallus gallus
MSQKPLSDDEKFLFVDKNFVNNPLAQADWSAKKLVWVPSEKHGFEAASIKEEKGDEVTVELQENGKKVTLSKDDIQKMNPPKFSKVEDMAELTCLNEASVLHNLRERYFSGLIYTYSGLFCVVINPYKQLPIYSEKIIDMYKGKKRHEMPPHIYAIADTAYRSMLQDREDQSILCTGESGAGKTENTKKVIQYLAVVASSHKGKKDTSITQGPSFSYGELEKQLLQANPILEAFGNAKTVKNDNSSRFGKFIRINFDVTGYIVGANIETYLLEKSRAIRQAKDERTFHIFYYLIAGASEQMRNDLLLEGFNNYTFLSNGHVPIPAQQDDEMFQETLEAMTIMGFTEEEQTSILRVVSSVLQLGNIVFKKERNTDQASMPDNTAAQKVCHLMGINVTDFTRSILTPRIKVGRDVVQKAQTKEQADFAIEALAKAKFERLFRWILTRVNKALDKTKRQGASFLGILDIAGFEIFEINSFEQLCINYTNEKLQQLFNHTMFILEQEEYQREGIEWNFIDFGLDLQPCIELIERPTNPPGVLALLDEECWFPKATDTSFVEKLIQEQGNHAKFQKSKQLKDKTEFCILHYAGKVTYNASAWLTKNMDPLNDNVTSLLNQSSDKFVADLWKDVDRIVGLDQMAKMTESSLPSASKTKKGMFRTVGQLYKEQLTKLMTTLRNTNPNFVRCIIPNHEKRAGKLDAHLVLEQLRCNGVLEGIRICRQGFPNRIVFQEFRQRYEILAANAIPKGFMDGKQACILMIKALELDPNLYRIGQSKIFFRTGVLAHLEEERDLKITDVIIAFQAQCRGYLARKAFAKRQQQLTAMKVIQRNCAAYLKLRNWQWWRLFTKVKPLLQVTRQEEEMQAKDEELQRTKERQQKAEAELKELEQKHTQLCEEKNLLQEKLQAETELYAEAEEMRVRLAAKKQELEEILHEMEARIEEEEERSQQLQAEKKKMQQQMLDLEEQLEEEEAARQKLQLEKVTADGKIKKMEDDILIMEDQNNKLTKERKLLEERVSDLTTNLAEEEEKAKNLTKLKNKHESMISELEVRLKKEEKSRQELEKIKRKLEGESSDLHEQIAELQAQIAELKAQLAKKEEELQAALARLEDETSQKNNALKKIRELESHISDLQEDLESEKAARNKAEKQKRDLSEELEALKTELEDTLDTTATQQELRAKREQEVTVLKRALEEETRTHEAQVQEMRQKHTQAVEELTEQLEQFKRAKANLDKTKQTLEKDNADLANEIRSLSQAKQDVEHKKKKLEVQLQDLQSKYSDGERVRTELNEKVHKLQIEVENVTSLLNEAESKNIKLTKDVATLGSQLQDTQELLQEETRQKLNVTTKLRQLEDDKNSLQEQLDEEVEAKQNLERHISTLTIQLSDSKKKLQEFTATVETMEEGKKKLQREIESLTQQFEEKAASYDKLEKTKNRLQQELDDLVVDLDNQRQLVSNLEKKQKKFDQMLAEEKNISSKYADERDRAEAEAREKETKALSLARALEEALEAKEELERTNKMLKAEMEDLVSSKDDVGKNVHELEKSKRTLEQQVEEMKTQLEELEDELQAAEDAKLRLEVNMQAMKSQFERDLQARDEQNEEKRRQLLKQLHEHETELEDERKQRALAAAAKKKLEVDVKDLESQVDSANKAREEAIKQLRKLQAQMKDYQRDLDDARAAREEIFATARENEKKAKNLEAELIQLQEDLAAAERARKQADLEKEEMAEELASANSGRTSLQDEKRRLEARIAQLEEELDEEHSNIETMSDRMRKAVQQAEQLNNELATERATAQKNENARQQLERQNKELRSKLQEMEGAVKSKFKSTIAALEAKIASLEEQLEQEAREKQAAAKTLRQKDKKLKDALLQVEDERKQAEQYKDQAEKGNLRLKQLKRQLEEAEEESQRINANRRKLQRELDEATESNDALGREVAALKSKLRRGNEPVSFAPPRRSGGRRVIENATDGGEEEIDGRDGDFNGKASE

SEQ ID NO: 124 - protein, 151 aa, Gallus gallus
MCDFSEEQTAEFKEAFQLFDRTGDGKILYSQCGDVMRALGQNPTNAEVMKVLGNPKSDEMNLKTLKFEQFLPMMQTIAKNKDQGCFEDYVEGLRVFDKEGNGTVMGAEIRHVLVTLGEKMTEEEVEQLVAGHEDSNGCINYEELVRMVLSG

SEQ ID NO: 125 - protein, 462 aa, Gallus gallus
QSYSSSQRVSSYRRTFGGGTSPVFPRASFGSRGSGSSVTSRVYQVSRTSAVPTLSTFRTTRVTPLRTYGSAYQGAGELLDFSLADAMNQEFLQTRTNEKVELQELNDRFANYIEKVRFLEQQNALMVAEVNRLRGKQPTRVAEMYEEELRELRRQVDALTGQRARVEVERDNLLDNLQKLKQKLQEEIQLKQEAENNLAAFRADVDAATLARIDLERRIESLQEEIAFLKKVHEEEIRELQAQLQEQHIQVEMDISKPDLTAALRDIRAQYESIAAKNIAEAEEWYKSKVSDLTQAANKNNDALRQAKQEMLEYRHQIQSYTCEIDALKGTNDSLMRQMREMEERFAGEAGGYQDTIARLEEEIRHLKDEMARHLREYQDLLNVKMALDVEIATYRKLLEGEENRISIPMHQTFASALNFRETSPDQRGSEVHTKKTVMIKTIETRDGEVVSEATQQQHEVL

SEQ ID NO: 126 - protein, 284 aa, Gallus gallus
MEAIKKKMQMLKLDKENAIDRAEQAEADKKQAEDRCKQLEEEQQGLQKKLKGTEDEVEKYSESVKEAQEKLEQAEKKATDAEAEVASLNRRIQLVEEELDRAQERLATALQKLEEAEKAADESERGMKVIENRAMKDEEKMELQEMQLKEAKHIAEEADRKYEEVARKLVVLEGELERSEERAEVAESRVRQLEEELRTMDQSLKSLIASEEEYSTKEDKYEEEIKLLGEKLKEAETRAEFAERSVAKLEKTIDDLEESLASAKEENVGIHQVLDQTLLELNNL

SEQ ID NO: 127 - protein, 162 aa, Sus scrofa
MGLETEKADVQLFMDDDSYSRHSGVDYADPKKFVDPGTDRDPHRLNSNLKVGFEDVIAEPVSTHSFDKVWICSHALFEISKYVIYKFLTVFLAIPLAFAAGILFATLSCLHIWIIIPFVKTCLMVLPSVQTIWKSVTDVVIAPLCTSAGRSFSSVSLQLSHD

SEQ ID NO: 128 - protein, 1004 aa, Gallus gallus
MKMADAKQKRNEQLKRWIGSETDLEPPVVKRKKTKVKFDDGAVFLAACSSGDTEEVLRLLERGADINYANVDGLTALHQACIDDNVDMVKFLVENGANINQPDNEGWIPLHAAASCGYLDIAEYLISQGAHVGAVNSEGDTPLDIAEEEAMEELLQNEVNRQGVDIEAARKEEERIMLRDARQWLNSGHINDVRHAKSGGTALHVAAAKGYTEVLKLLIQARYDVNIKDYDGWTPLHAAAHWGKEEACRILVENLCDMEAVNKVGQTAFDVADEDILGYLEELQKKQNLLHSEKREKKSPLIESTANLDNNQTQKTFKNKETLIMEQEKNASSIESLEHEKADEEEEGKKDESSCSSEEEEDDDSESEAETDKAKTLANANTTSTQSASMTAPSVAGGQGTPTSPLKKFPTSTTKVSPKEEERKDESPASWRLGLRKTGSYGALAEITASKEAQKEKDSAGVIRSASSPRLSSSLDNKEKEKDGKGTRLAYVAPTIPRRLASTSDIDEKENRDSSASSIRSGSSYARRKWEEDVKKNSLNEGPTSLNTSYQRSGSFGRRQDDLVSSNVPSTASTVTSSAGLQKTLPASANTTTKSTTGSTSAGVQSSTSNRLWAEDSTEKEKDSVPTAVTVPVAPSVVNAAATTTAMTTATSGTVSSTSEVRERRRSYLTPVRDEESESQRKARSRQARQSRRSTQGVTLTDLQEAEKTIGRSRSTRTREQENEEKEKEEKEKQDKEKQEEKKESETKDDDYRQRYSRTVEEPYHRYRPTSTSTSTSSTSSLSTSTSSLSSSSQLNRPNSLIGITSAYSRSGTKESEREGGKKEEEKEEDKSQPKSIRERRRPREKRRSTGVSFWTQDSDENEQEHQSDSEEGTNKKETQSDSLSRYDTGSLSVSSGDRYDSAQGRSGSQSYLEDRKPYCSRLEKEDSTDFKKLYEQILAENEKLKAQLHDTNMELTDLKLQLEKTTQRQERFADRSLLEMEKRVSGKSQYLLGGKKSSRKKDI

SEQ ID NO: 129 - protein, 252 aa, Gallus gallus
MSNANFNRGPAYGLSAEVKNKLAQKYDPQTERQLRVWIEGATGRRIGDNFMDGLKDGVILCELINKLQPGSVQKVNDPVQNWHKLENIGNFLRAIKHYGVKPHDIFEANDLFENTNHTQVQSTLIALASQAKTKGNNVGLGVKYAEKQQRRFQPEKLREGRNIIGLQMGTNKFASQQGMTAYGTRRHLYDPKLGTDQPLDQATISLQMGTNKGASQGMTVYGLPRQVYDPKYCDAPGLLGEDGLNHSFYNSQ

SEQ ID NO: 130 - protein, 297 aa, Ovis aries
MSSAHFNRGPAYGLSAEVKNKLAQKYDHQREQELREWIEGVTGRRIGNNFMDGLKDGIILCEFINKLQPGSVKKVNESTQNWHQLENIGNFIKAITKYGVKPHDIFEANDLFENTNHTQVQSTLLALASMAKTKGNKVNVGVKYAEKQERKFEPEKLREGRNIIGLQMGTNKFASQQGMTAYGTRRHLYDPKLGTDQPLDQATISLQMGTNKGASQAGMTAPGTKRQIFEPGLGMEHCDTLNVSLQMGSNKGASQRGMTVYGLPRQVYDPKYCLTPEYPELGEPAHNHHPHNYYNSA

SEQ ID NO: 131 - protein, 225 aa, Cervus elaphus
MSSTQFNKGPSYGLSAEVKNRLQSKYDPQKEAELRSWIEGLTGLSIGPDFQKGLKDGIILCTLMNKLQPGSIPKINRSMQNWHQLENLSNFIKAMAKTKGLQSGVDIGLKYSEKQERNFDDATMKAGQCVIGLQVGMTAPGTRRHIYDTKLGTDKCDNSSMSLQMGYTQGANQSGQVFGLGRQIYDPKYCPQGPVADGAPAAAGDGPGPGEPSECPPYYQEEAGY

SEQ ID NO: 132 - protein, 305 aa, Gallus gallus
MSSSQFNKGPSYGLSAEVKNRLAQKYDPQKEAELRTWIESVTGRQIGADFQKGLKDGVILCELMNKLQPNSVRKINRSALNWHQLENLSNFIKAMVSYGMNPVDLFEANDLFESGNLTQVQVSLLALAGMAKTKGLQSGVDIGVKYSERQQRNFDEAKMKAGQCVIGLQMGTNKCASQSGMTAYGTRRHLYDPKNQILPPMDHSTISLQMGTNKCASQVGMTAPGTRRHIYDAKMGLEKCDNSSMSLQMGSNQGANQSGQVFGLGRQIYDPKYCPQGTPGDAANAAGEPGADPPGYHYYHQEESC

SEQ ID NO: 133 - protein, 331 aa, Gallus gallus
MTHFNKGPSYGLSAEVKNKIALKYDPQIEEDLRNWIEEVTGLSIGANFQLGLKDGIILCELINKLQPGSVKKINQSKLNWHQLENIGNFIKAIQVYGMKPHDIFEANDLFENGNMTQVQTTLVALAGLAKTKGFHTTIDIGVKYAEKQARSFDAGKLKAGQSVIGLQMGTNKCASQAGMTAYGTRRHLYDPKMQTDKPFDQTTISLQMGTNKGASQAGMLAPGTRRDIYDQKHILQPVDNSTISLQMGTNKVASQKGMSVYGLGRQVYDPKYCAAPTEPVIHNGSQGTGTNGSEISDSDYQAEYPDDYHGEYQDDYQRDYHGQYSDQGIDY

SEQ ID NO: 134 - protein, 200 aa, Gallus gallus
MANKGPAYGMSRDVQSKIEKKYDDELEDRLVEWIVAQCGSSVGRPDRGRLGFQVWLKNGIVLSQLVNSLYPDGSKPVKIPDSPPTMVFKQMEQIAQFLKAAEDYGVVKTDMFQTVDLFEAKDMAAVQRTLVALGSLAVTKNDGHYHGDPNWFMKKAQEHKREFSESQLKEGKNIIGLQMGTNKGASQAGMSYGRPRQIIS

SEQ ID NO: 135 - protein, 748 aa, Gallus gallus
RLSYQRNDDDEEEAARERRRRARQERLRQKEEGDVSGEVTEKSEVNAQNSVAEEETKRSTDDEAALLERLARREERRQKRLQEALERQKEFDPTITDGSLSVPSRREVNNVEENETTGKEEKVETRQGRCEIEETETVTKSYQRNNWRQDGEEEGKKEEKDSEEEKPKEVPTEENQVDVAVEKSTDKEEVVETKTLAVNAENDTNAMLEGEQSITDAADKEKEEAEKEREKLEAEEKERLKAEEEKKAAEEKQKAEEEKKAAEERERAKAEEEKRAAEERERAKAEEERKAAEERERAKAEEERKAAEERAKAEEERKAAEERAKAEEERKAAEERAKAEKERKAAEERERAKAEEEKRAAEEKARLEAEKLKEKKKMEEKKAQEEKAQANLLRKQEEDKEAKVEAKKESLPEKLQPTSKKDQVKDNKDKEKAPKEEMKSVWDRKRGVPEQKAQNGERELTTPKLKSTENAFGRSNLKGAANAEAGSEKLKEKQQEAAVELDELKKRREERRKILEEEEQKKKQEEAERKIREEEEKKRMKEEIERRRAEAAEKRQKVPEDGVSEEKKPFKCFSPKGSSLKIEERAEFLNKSAQKSGMKPAHTTAVVSKIDSRLEQYTSAVVGNKAAKPAKPAASDLPVPAEGVRNIKSMWEKGNVFSSPGGTGTPNKETAGLKVGVSSRINEWLTKTPEGNKSPAPKPSDLRPGDVSGKRNLWEKQSVEKPAASSSKVTATGKKSETNGLRQFEKEP

SEQ ID NO: 136 - protein, 2541 aa, Gallus gallus
MVALSLKISIGNVVKTMQFEPSTMVYDACRMIRERVPEAQMGQPNDFGLFLSDEDPKKGIWLEAGKALDYYMLRNGDTMEYKKKQRPLKIRMLDGTVKTVMVDDSKTVTDMLMTICARIGITNYDEYSLVREIMEEKKEEVTGTLKKDKTLLRDEKKMEKLKQKLHTDDELNWLDHGRTLREQGIDDNETLLLRRKFFYSDQNVDSRDPVQLNLLYVQARDDILNGSHPVSFDKACEFAGYQCQIQFGPHNEQKHKPGFLELKDFLPKEYIKQKGERKIFMAHKNCGNMSEIEAKVRYVKLARSLKTYGVSFFLVKEKMKGKNKLVPRLLGITKECVMRVDEKTKEVIQEWSLTNIKRWAASPKSFTLDFGDYQDGYYSVQTTEGEQIAQLIAGYIDIILKKKKSKDHFGLEGDEESTMLEDSVSPKKSTVLQQQFNRVGKAELGSVALPAIMRTGAGGPENFQVGTMPQAQMQITSGQMHRGHMPPLTSAQQALTGTINSSMQAVNAAQATLDDFETLPPLGQDAASKAWRKNKMDESKHEIHSQVDAITAGTASVVNLTAGDPADTDYTAVGCAVTTISSNLTEMSKGVKLLAALMEDEGGNGRQLLQAAKNLASAVSDLLKTAQPASAEPRQNLLQAAGLVGQTSGELLQQIGESDTDPRFQDMLMQLAKAVASAAAALVLKAKNVAQKTEDSALQTQVIAAATQCALSTSQLVACTKVVAPTISSPVCQEQLIEAGKLVAKSAEGCVEASKAATNDDQLLKQVGVAATAVTQALNDLLQHIKQHATGGQPIGRYDQATDTILNVTENIFSSMGDAGEMVRQARILAQATSDLVNAIKADAEGETDLENSRKLLSAAKILADATAKMVEAAKGAAAHPDSEEQQQRLREAAEGLRMATNAAAQNAIKKKLVHKLEHAAKQAAASATQTIAAAQHAAASNKNPAAQQQLVQSCKVVADQIPMLVQGVRGSQSQPDSPSAQLALIAASQNFLQPGGKMVAAAKATVPTITDQASAMQLSQCAKNLAAALAELRTAAQKAQEACGPLEIDSALGLVQSLERDLKEAKAAARDGKLKPLPGETMEKCAQDLGNSTKAVTSAIAHLLGEVAQGNENYTGIAAREVAQALRSLSQAARGVAANSSDPQVQNAMLECASDVMDKANNLIEEARKAVAKPGDPDSQQRLVQVAKAVSQALNRCVNCLPGQRDVDAAIRMVGEASKRLLSDSFPPSNKTFQEAQSQLNRAAAGLNQSANELVQASRGTPQDLAKSSGKFGQDFNEFLQAGVEMASLSPTKEDQAQVVSNLKSISMSSSKLLLAAKALSADPTSPNLKSQLAAAARAVTDSINQLITMCTQQAPGQKECDNALRELETVKELLENPTQTVNDMSYFSCLDSVMENSKVLGESMAGISQNAKNSKLPEFGESISAASKALCGLTEAAAQAAYLVGVSDPNSQAGQQGLVDPTQFARANQAIQMACQNLVDPACTQSQVLSAATIVAKHTSALCNTCRLASSRTANPVAKRQFVQSAKEVANSTANLVKTIKALDGAFNEENRERCRAATAPLIEAVDNLTAFASNPEFATVPAQISPEGRRAMEPIVTSAKTMLESSAGLIQTARSLAVNPKDPPQWSVLAGHSRTVSDSIKKLITNMRDKAPGQRECDEAIDVLNRCMREVDQASLAAISQQLAPREGISQEALHNQMITAVQEINNLIEPVASAARAEASQLGHKVSQMAQYFEPLILAAIGAASKTPNHQQQMNLLDQTKTLAESALQMLYTAKEAGGNPKQAAHTQEALEEAVQMMKEAVEDLTTTLNEAASAAGVVGGMVDSITQAINQLDEGPMGEPEGTFVDYQTTMVKTAKAIAVTVQEMVTKSTTNPDELGILANQLTNDYGQLAQQAKPAALTAENEEIGSHIKRRVQELGHGCAALVTKAGALQCSPSDAYTKKELIESARKVSEKVSHVLAALQAGNRGTQACITAASAVSGIIADLDTTIMFATAGTLNRENSETFADHREGILKTAKALVEDTKVLVQNATASQEKLAQAAQSSVSTITRLAEVVKLGAASLGSEDPETQVVLINAVKDVAKALGDLIGATKAAAGKAGDDPAVYQLKNSAKVMVTNVTSLLKTVKAVEDEATKGTRALEATIEHIRQELAVFSSPVPPAQVSTPEDFIRMTKGITMATAKAVAAGNSCRQEDVIATANLSRRAIADMLRACKEAAYHPEVSADVRQRALRFGKECADGYLELLEHVLVILQKPTHELKQQLAGYSKRVASSVTELIQAAEAMKGTEWVDPEDPTVIAENELLGAAAAIEAAAKKLEQLKPRAKPKQADESLDFEEQILEAAKSIAAATSALVKAASAAQRELVAQGKVGVIPANAVDDGQWSQGLISAARMVAAATNNLCEAANAAVQGHASEEKLISSAKQVAASTAQLLVACKVKADHDSEAMKRLQAAGNAVKRASDNLVKAAQKAAAFQDHDETVVVKEKMVGGIAQIIAAQEEMLRKERELEEARKKLAMIRQQQYKFLPTELRDEEQN

SEQ ID NO: 137 - protein, 134 aa, Gallus gallus
MNCWNYYTDCILSDKYIDDVAIVGLSDNKYVWAAKPGGLLSAVSPREVDLITGQDRITFLTAGISIAGKKCIVIRDSLLVEGDNVMDIRSRGGDSRSICIGKTPKALIFLMGNRGVHGGVLNLKIHDMIAGMTL

SEQ ID NO: 138 - protein, 149 aa, Gallus gallus
MIQLQALLKESLIRTKHVENAAAIGINEREVCASTSGFYVPPENAINLIYAFYKNLLQVRKEGLYFRQKHYECVRADEHSIYLKNAEGGLIVVKTNALILIATYRVGMYPSVCVEAVEKLGKTNTCTCMAACQRFIGWLCSCKELQKCV

SEQ ID NO: 139 - protein, 423 aa, Gallus gallus
MATYSFRQTTSSVAGGPCGRSLRLGGGSFRAPSIHGGSGGRGVSVSSARFVSSGLGSGLGGGYGGAFSSSFSAGFGGGYGGGLGSGDGLLSGNEKTTMQNLNDRLASYLDKVRALEEANSDLETKIREWYLKQGPGPARDYSPYYKAIEDLRDQILAATIDNSKVVLQIDNARLAADDFKTKFETEQALRMSVEADINGLRRVLDELTLARTDLELQIENLKEELAYLKKNHEEEMSALGGQVASQVSVEVDSAPGIDLSKILADMRDQYEHMAEKNRKDAEAWFHSKTEELNRELAVNTEQLQSSKSEVTDLRRTLQGLEIELQSQLSMKGALESTLADTEGRYGAQLAQIQDMIGSIEAQLAELRADMERQNSEYKMLMDIKTRLEQEIATYRQLLEGQESQLFGSLSGSPDKRDKPADGK

SEQ ID NO: 140 - protein, 161 aa, Salmo salar
MDDVYKAAVENLTEEQKNEFKAAFDIACQGAEDGCISTKELGKVMRMLGQNPTPEELQEMIDEVDEDGSGTVDFDEFLVMMVRCMKEESKGKSEEELAELFRMFDKNGDGYIDLEELKTMLESTGEAITEDDIEELMKDGDKNNDGKIDYDEFLEFMKGVE

SEQ ID NO: 141 - protein, 161 aa, Gallus gallus
MDDIYKAAVEQLTEEQKNEFKAAFDIFVLGAEDGCISTKELGKVMRMLGQNPTPEELQEMIDEVDEDGSGTVDFDEFLVMMVRCMKDDSKGKTEEELSDLFRMFDKNADGYIDLEELKIMLQATGETITEDDIEELMKDGDKNNDGRIDYDEFLEFMKGVE

SEQ ID NO: 142 - protein, 161 aa, Bos taurus
MDDIYKAAVEQLTEEQKNEFKAAFDIFVLGAEDGCISTKELGKVMRMLGQNPTPEELQEMIDEVDEDGSGTVDFDEFLVMMVRCMKDDSKGKSEEELSDLFRMFDKNADGYIDLEELKIMLQATGETITEDDIEELMKDGDKNNDGRIDYDEFLEFMKGVE

SEQ ID NO: 143 - protein, 272 aa, Gallus gallus
MSDQQLDCALDLMRRLPPQQIEKNLSDLIDLVPSLCEDLLSSVDQPLKIARDKVVGKDYLLCDYNRDGDSYRSPWSNKYDPPLEDGAMPSARLRKLEVEANNAFDQYRDLYFEGGVSSVYLWDLDHGFAGVILIKKAGDGSKKIKGCWDSIHVVEVQEKSSGRTAHYKLTSTVMLWLQTNKTGSGTMNLGGSLTRQMEKDETVSDSSPHIANIGRLVEDMENKIRSTLNEIYFGKTKDIVNGLRSVQTFADKSKQEALKNDLVEALKRKQQS

SEQ ID NO: 144 - protein, 782 aa, Bos taurus
MSGAPKESLGPQGLPGLGKACLTTMDKKLNMLNEKVDKLLHFQEDVTEKLQCVYRGMGHLEQGLHRLEASRGLGPAGADRSPPSDAQAGWPEVLELVRAGRQDAAQQGARLEALFRMVMAVDKAIALVGAVLQNSKVVDFIMQGSVPWRKGSLADNKEQVEEKEAKPKHTLSTRGVQAELRGPWEESQKADLPEGTGSDLPTQTEAPPEQRDGISGPTQVRPEVEVQAPRASSKNPGIGLELSVVSERVSEAPTGQEAALSAGRGTSPSRPDPRPSVEGMRLTPAPPAQAKAAHGGGETPPRISIHVQETDTPGELLVTRGGSLRTSPPAETPAAVPPGEQDPPGPRCCPQAPGTESGKPILRGASVRKRSCDEGAKAKEKQGPGSELTMAPSRARRDKGADSGASGPQQDMNPGAGNPDPGKDCTAGGVGSAEAGSRTPPGAEASSLVLDDSPAPPAPFEHRVVSVRETSTSAGYTVCQHEVLGGGRFGQVHRCTEKATGLSLAAKIIKVKSAKDREDVKNEINIMNQLSHVNLIQLYDAFESKNSFTLVMEYVDGGELFDRITEEKYHLTELDVVLFTKQICEGVHYLHQHYVLHLDLKPENILCVNQTGHQIKIIDFGLARRYKPREKLKVNFGTPEFLAPEVVNYEFVSFPTDMWSVGVITYMLLSGLSPFLGETDAETMNFIVNCNWDFDADTFEGLSEEAKDFVSRLLVKEKSCRMSATQCLKHEWLNNLPAKASKSKVHLKSQLLLQKYMAQRKWKKHFYVVTAANRLRKFPTCP

SEQ ID NO: 145 - protein, 161 aa, Salmo salar
MNDIYKAAVEQLTDEQKNEFKAAFDIFVQDAEDGCISTKELGKVMRMLGQNPTPEELQEMIDEVDEDGSGTVDFDEFLVMMVRCMKDDSKGKTEEELADLFRMFDKNADGYIDLEELKVMLEATGEAITEDDIEELMKDGDKNNDGKIDYDEFLEFMKGVE

SEQ ID NO: 146 - protein, 167 aa, Sus scrofa
MATSELSCQVSEENCERREAFWAEWKDLTLSTRPEEGCSLHEEDAERRETYHQQGQCQALVQRSPWLVMRMGILGRGLQEYQLPYQRVLPLPIFTPAKVGAAKEEREETPIQLRELLALETALGGQCLDRQDVAEITKQLPPVVPVSKPGALRRSLSRSMSQEAQRG

SEQ ID NO: 147 - protein, 284 aa, Gallus gallus
MDAIKKKMQMLKLDKENALDRAEQAEADKKAAEERSKQLEDELVALQKKLKGTEDELDKYSESLKDAQEKLELADKKATDAESEVASLNRRIQLVEEELDRAQERLATALQKLEEAEKAADESERGMKVIENRAQKDEEKMEIQEIQLKEAKHIAEEADRKYEEVARKLVIIEGDLERAEERAELSESKCAELEEELKTVTNNLKSLEAQAEKYSQKEDKYEEEIKVLTDKLKEAETRAEFAERSVTKLEKSIDDLEDELYAQKLKYKAISEELDHALNDMTSI

SEQ ID NO: 148 - protein, 283 aa, Gallus gallus
MEAIKKKMQMLKLDKENAIDRAEQAEADKKQAEDRCKQLEEEQQGLQKKLKGTEDEVEKYSESVKEAQEKLEQAEKKATDAEAEVASLNRRIQLVEEELDRAQERLATALQKLEEAEKAADESERGMKVIENRAMKDEEKMELQEMQLKEAKHIAEEADRKYEEVARKLVVLEGELERSEERAEVAESKCGDLEEELKIVTNNLKSLEAQADKYSTKEDKYEEEIKLLGEKLKEAETRAEFAERSVAKLEKTIDDLEERSRQEAEKNRVLTNELRVILTELNN

SEQ ID NO: 149 - protein, 151 aa, Bos taurus
MMAEEHTDLEAQIVKDIHFKEIDLVNRDPKNINEDIVKVDFEDVIAEPVGTYSFDGVWKVSYTTFTVSKYWCYRLLSTLLGVPLALLWGFLFACISFCHIWAVVPCIKSYLIEIQCISHIYSLCIRTFCNPLFAALGQVCSNIKVMLRKEV

SEQ ID NO: 150 - protein, 1450 aa, Gallus gallus
MSSVAVPFYQRRHKHFDQSYRNIQTRYVLEEYAARKAASRQAAHYESTGLGKTTCRLCARRARSLAHEAMQESRKRTHEQKSHASDEKRIKFASELSSLEREIHMARHHAREQLDRLAIQRMVEENMALERHVVEEKISRAPEILVRLRSHTVWEKMSVRLCFTVQGFPSPVVQWYKNEELITPASDPAKYSVENKYGVHVLHINRADFDDSATYSAVATNIHGQASTNCAVVVRRFRESEEPHPAGIMPFHLPLSYDVCFTHFDVQFLEKFGVTFATEGETLTLKCSVLVTPELKRLRPRAEWYRDDVLIKDSKWTKLYFGEGQAALSFTHLNKDDEGLYTLRMVTKGGVNECSAFLFVRDADALIAGAPGAPMDVKCHDANRDYVIVTWKPPNTTSQNPVIGYFVDKCEVGLENWVQCNDAPVKICKYPVTGLYEGRSYIFRVRAVNSAGISRPSRVSEPVAALDPVDLERTQTVHVDEGRKIVISKDDLEGDIQIPGPPTNVHASEISKTYVVLSWDPPVPRGREPLTYFIEKSMVGSGSWQRVNAQVAVKSPRYAVFDLAEGKPYVFRVLSANKHGISDPSEITEPIQPQDIVVVPSAPGRVVATRNTKTSVVVQWDKPKHEENLYGYYIDYSVVGSNQWEPANHKPINYNRFVVHGLETGEQYIFRVKAVNAVGFSENSQESEAIKVQAALTCPSYPHGITLLNCDGHSMTLGWKAPKYSGGSPILGYYIDKREANHKNWHEVNSSVISRTIYTVEDLTEDAFYEFKIAAANVVGIGHPSDPSEHFKCKAWTMPEPGPAYDLTVCEVRNTSLVLLWKAPVYEGKSPITGYLVDYKEVDTEDWITANEKPTSHRYFKVTDLHQGHTYVFKVRAVNDAGVGKSSEISEPVFVEASPGTKEIFSGVDEEGNIYLGFECKEATDASHFLWGKSYEEIEDSDKFKIETKGDHSKLYFKHPDKSDLGTYCISVSDTDGVSSSFVLDEEELERLMTLSNEIKNPTIPLKSELAYEVLDKGEVRFWIQAESLSPNSTYRFVINDKEVENGDRHKISCDHSNGIIEMVMDKFTIDNEGTYTVQIQDGKAKNQSSLVLIGDAFKAILAESELQRKEFLRKQGPHFSEFLYWEVTEECEVLLACKIANTKKETVFKWYRNGSGIDVDEAPDLQKGECHLTVPKLSRKDEGVYKATLSDDRGHDVSTLELSGKVYNDIILALSRVSGKTASPLKILCTEEGIRLQCFLKYYNEEMKVTWSHRESKISSGEKMKIGGGEDVAWLQITEPTEKDKGNYTFEIFSDKESFKRTLDLSGQAFDDALTEFQRLKAAAFAEKNRGKVIGGLPDVVTIMDGKTLNLTCTVFGNPDPEVVWFKNDKALELNEHYLVSLEQGKYASLTIKGVTSEDSGKYSIYVKNKYGGETVDVTVSVYRHGEKIPEVNQGQLAKPRLIPPSSST

SEQ ID NO: 151 - protein, 2723 aa, Bos taurus
MMNNSGYSEAPGFGLGDEVDDMPSTEKDLAEDAPWKKIQQNTFTRWCNEHLKCVGKRLTDLQRDLSDGLRLIALLEVLSQKRMYRKFHPRPNFRQMKLENVSVALEFLEREHIKLVSIDSKAIVDGNLKLILGLIWTLILHYSISMPMWEDEDDEDARKQTPKQRLLGWIQNKVPQLPITNFNRDWQDGKALGALVDNCAPGLCPDWEAWDPNQPVENAREAMQQADDWLGVPQVIAPEEIVDPNVDEHSVMTYLSQFPKAKLKPGAPVRSKQLNPKKAIAYGPGIEPQGNTVLQPAHFTVQTVDAGIGEVLVYIEDPEGHTEEAKVVPNNDKNRTYAVSYVPKVAGLHKVTVLFAGQNIERSPFEVNVGMALGDANKVSARGPGLEPVGNVANKPTYFDIYTAGAGTGDVAVVIVDPQGRRDTVEVALEDKGDSTFRCTYRPVMEGPHTVHVAFAGAPITRSPFPVHVAEACNPNACRASGRGLQPKGVRVKEVADFKVFTKGAGSGELKVTVKGPRGTEEPVKVREAGDGVFECEYYPVVPGKYVVTITWGGYAIPRSPFEVQVSPEAGIQKVRAWGPGLETGQVGKSADFVVEAIGTEVGTLGFSIEGPSQAKIECDDKGDGSCDVRYWPTEPGEYAVHVICDDEDIRDSPFIAHIQPAPPDCFPDKVKAFGPGLEPTGCIVDKPAEFTIDARAAGKGDLKLYAQDADGCPIDIKVIPNGDGTFRCSYVPTKPIKHTIIVSWGGVNVPKSPFRVNVGEGSHPERVKVYGPGVEKTGLKANEPTYFTVDCSEAGQGDVSIGIKCAPGVVGPAEADIDFDIIKNDNDTFTVKYTPPGAGRYTIMVLFANQEIPASPFHIKVDPSHDASKVKAEGPGLNRTGVEVGKPTHFTVLTKGAGKAKLDVHFAGAAKGEAVRDFEIIDNHDYSYTVKYTAVQQGNMAVTVTYGGDPVPKSPFVVNVAPPLDLSKVKVQGLNSKVAVGQEQAFSVNTRGAGGQGQLDVRMTSPSRRPIPCKLEPGGGAETQAVRYMPPEEGPYKVDITYDGHPVPGSPFAVEGVLPPDPSKVCAYGPGLKGGLVGTPAPFSIDTKGAGTGGLGLTVEGPCEAKIECQDNGDGSCAVSYLPTEPGEYTINILFAEAHIPGSPFKATIRPVFDPSKVRASGPGLERGKAGEAATFTVDCSEAGEAELTIEILSDAGVKAEVLIHNNADGTYHITYSPAFPGTYTITIKYGGHPVPKFPTRVHVQPAVDTSGVKVSGPGVEPHGVLREVTTEFTVDARSLTATGGNHVTARVLNPSGAKTDTYVTDNGDGTYRVQYTAYEEGAHLVEVLYDDVAVPKSPFRVGVTEGCDPTRVRAFGPGLEGGLVNKANRFTVETRGAGTGGLGLAIEGPSEAKMSCKDNKDGSCTVEYIPFTPGDYDVNITFGGRPIPGSPFRVPVKDVVDPGKVKCSGPGLGAGVRARVPQTFTVDCSQAGRAPLQVAVLGPTGVAEPVEVRDNGDGTHTVHYTPATDGPYTVAVKYADQEVPRSLSSPFKIKVLPAHDASKVRASGPGLNASGIPASLPVEFTIDARDAGEGLLTVQILDPEGKPKKANIRDNGDGTYTVSYLPDMSGRYTITIKYGGDEIPYSPFRIHALPTGDASKCLVTVSIGGHGLGACLGPRIQIGEETVITVDAKAAGKGKVTCTVSTPDGAELDVDVVENHDGTFDIYYTAPEPGKYVITIRFGGEHIPNSPFHVLACEAMPRVEEPPDVPQLHRPSAYPTHWATEEPVVPAEPMESMLRPFNLVIPFTVQKGELTGEVRMPSGKTARPNITDNKDGTITVRYAPTEKGLHQMGIKYDGNHIPGSPLQFYVDAINSRHVSAYGPGLSHGMVNKPATFTIVTKDAGEGGLSLAVEGPSKAEITCKDNKDGTCTVSYLPTAPGDYSIIVRFDDKHIPGSPFTAKITGDDSMRTSQLNVGTSTDVSLKITESDLSQLTASIRAPSGNEEPCLLKRLPNRHIGISFTPKEVGEHVVSVRKSGKHVTNSPFKILVGPSEIGDASKVRVWGKGLSEGHTFQVAEFIVDTRNAGYGGLGLSIEGPSKVDINCEDMEDGTCKVTYCPTEPGTYIINIKFADKHVPGSPFTVKVTGEGRMKESITRRRQAPSIATIGSTCDLNLKIPGNWFQMVSAQERLTRTFTRSSHTYTRTERTEISKTRGGETKREVRVEESTQVGGDPFPAVFGDFLGRERLGSFGSITRQQEGEASSQDMTAQVTSPSGKTEAAEIVEGEDSAYSVRFVPQEMGPHTVTVKYRGQHVPGSPFQFTVGPLGEGGAHKVRAGGTGLERGVAGVPAEFSIWTREAGAGGLSIAVEGPSKAEIAFEDRKDGSCGVSYVVQEPGDYEVSIKFNDEHIPDSPFVVPVASLSDDARRLTVTSLQETGLKVNQPASFAVQLNGARGVIDARVHTPSGAVEECYVSELDSDKHTIRFIPHENGVHSIDVKFNGAHIPGSPFKIRVGEQSQAGDPGLVSAYGPGLEGGTTGVSSEFIVNTLNAGSGALSVTIDGPSKVQLDCRECPEGHVVTYTPMAPGNYLIAIKYGGPQHIVGSPFKAKVTGPRLSGGHSLHETSTVLVETVTKSSSSRGSSYSSIPKFSSDASKVVTRGPGLSQAFVGQKNSFTVDCSKAGTNMMMVGVHGPKTPCEEVYVKHMGNRVYNVTYTVKEKGDYILIVKWGDESVPGSPFKVNVP

SEQ ID NO: 152 - protein, 352 aa, Gallus gallus
MTLPFRKDLDKYKDLDEDDILGKLSEEELKQLETVLDDLDPENALLPAGFRQKDQTAKKASGPFDRERLLAYLEKQALEHKDREDYVPFTKEKKGKVFIPKQKPAQSYAEEKIALDPELEEALTSATDTELCDLAAILGMSNLITNNQFCDIVGSSNGVGKDSFSNIVKGEKMLPVFDEPPNPTNVEETLQRIKDNDSRLVEVNLNNIKNIPIPTLKEFAKALETNTHVKNFSLAATRSNDPVAVALADMLRVNTKLKSLNIESNFITGVGILALVDALKDNETLTEIKIDNQRQQLGTLAEVEIAKMLEENTKILKFGYHFTQQGPRARAAAAITKNNDLVRKRRVEGDGQ

SEQ ID NO: 153 - protein, 359 aa, Gallus gallus
MSYRKELEKYRDLDEDKILGALTEEELRKLENELEELDPDNALLPAGLRQRDQTQKPPTGPFKREELMAHLEQQAKDIKDREDLVPFTGEKRGKAWIPKQKPMDPVLESVTLEPELEEALANASDAELCDIAAILGMHTLMSNQQYYEALGSSTIVNKEGLNSVIKPTKYKPVPDEEPNSTDVEETLKRIQNNDPDLEEVNLNNIMNIPVPTLKALAEALKTNTYVKKFSIVGTRSNDPVAFALAEMLKVNNTLKSLNVESNFISGSGILALVEALQSNTSLIELRIDNQSQPLGNNVEMEIANMLEKNTTLLKFGYHFTQQGPRLRASNAMMNNNDLVRKRRLAELNGPIFPKCRTGV

SEQ ID NO: 154 - protein, 359 aa, Sus scrofa
MSYRRELEKYRDLDEDEILGALTEEELRTLENELDELDPDNALLPAGLRQKDQTTKAPTGPFKREELLDHLEKQAKEFKDREDLVPYTGEKRGKVWVPKQKPMDPVLETVTLEPELEEALANASDAELCDIAAILGMHTLMSNQQYYQALGSSSIVNKEGLNSVIKPTQYKPVPDEEPNATDVEETLERIKNNDPKLEEVNLNNIRNIPIPTLKAYAEALKENSYVKKFSIVGTRSNDPVAFALAEMLKVNKVLKTLNVESNFISGAGILRLVEALPYNTSLVELKIDNQSQPLGNKVEMEIVSMLEKNATLLKFGYHFTQQGPRLRASNAMMNNNDLVRKRRLADLTGPIIPKCRSGI

SEQ ID NO: 155 - protein, 471 aa, Gallus gallus; identical to SEQ ID NO: 5

SEQ ID NO: 156 - protein, 962 aa, Gallus gallus
MYFSFMLAGLHRRKEFSLLFPPSIKMRVSVTQEFTEDENENGEEERVFLKPVIEDRNMELARKCSEIISDVHYKEEFEKSKGKCIFVPDTPQLKHVKSVGAFISEVKYKGAAKKDLSNSLYQQMPATIDSAFAKELTQLQSKVLYKQKHDAEKGTSDYAHMKEPPDIKHAMEVNKYQSDVSYKRDVQDTHRYTEVLNRPDIKMATEITKIISDAEYKKGRGEMNKEPAVLGRPDFEHAKGVSKLLSQVKYKEQFKKEMKSHQYNPLDSASFKQAQIASTLASNVNYKKDYKESLHDPASDLPNLLYLNHALNISKMHSDVKYRENYEKSKGKSMLEFVDTPLYQVSKDVQKMQSEKIYRKDFEESLKGRPSLDLDKTPEFLHIKQVTNLLKEKEYRKDLEEWMKGKGMTVFEDTPDLIRVKNAAQILNEKQYKKDLETEIKGKGMQVGPDTPEIRRAKKASEIASTKEYKKDLENEIKGKGMEVGMDTPDIQRAKKASEIVSQKEYRKDLETEIIGKGMQVGPFTPEIQRVKRASEIASQKMYKDEAEKMLCNYSAVPDTPEMERIKSTQKNISSVFYKKVVGAGTAVKETPEIERVKKNQQNISSIKYKEETQHATPISDPPELRRIKENQKNISNVHYKEQLCRATPVSVTPEIERVKRNQENVSMVHYREQPGKATAVSITPEIERVKKNQDNISSVKYSSDQRQMKGRRSVILDTPELRHVKETQNNISMVKYHEDFEKTKGRGFTPVVDDPITERVRKNTQVVSDAAYKGVHPHIVEMDRRPGIIVDLKVWRTDPGSIFDIDPLEDNIQSRSLHMLSERASRYSKQYLHSTSLGDYKSDGSDTNPTFSYCSEITRPSDEGAPVLPGAYQQSQSQGYGYMHQTSMSSMRSVHSQPHPAGLRTYRAMYDYSAQDEDEVSFRDGDYIINVQPIDDGWMYGTVQRTGKTGMLPANYIEFVN

SEQ ID NO: 157 - protein, 1730 aa, Bos taurus
MNVQACSRCGYGVYPAEKINCLDQIWHKACFHCEVCKMMLSVNNFVSYQKKPYCHAHNPKNNTFTSVYYTPLNLNVRKPPEAICGIGGQEDGERFKSVFHWDMKSKDEAAAPNRQPQVDERAYWSGYREGDAWCPGALPDPEIVRMVEARKSLGEEYPEDYEQQRGKGSFPAMITPAYQRAKIANQLASQVEYKRGHDERISRFSTVADTPELLRAKAGGQLQSDVRYTEAYEQQRGKGSFPAMITPAYQIAKRANELASDVRYHQQYQREMKGMAGPAAGAEGPLPKEYMDQYGQGYSEEYGEHRGKGSFPAMITPAYQNAKKANELASDIKYRQDFNKMKGAAHYHSLPAQDNLVLKRAQSVNKLVSEVEYKKDLESSKGHSINYCETPQFRNVCKISKFTSDNKYKENYQNRMRGRYEGVGMDKRMLHALKVGSLASNIAYKADYKHDVVDYNYPATLTPSYQTTVKLAPLKDVNYRQSIDKLKYSSVTNTPQIVQAKINAQQLSHVNYRADYEKNKLNYTLPQDVPQLVKARTNAELFSEVKYREGWEKTKGKGFEMKLDAMSLLAAKASGELASNIKYKEEYEKAKGKVLGTTDSRLLHSLQVAKMSSEVEYKKGFEKSKTHFHLPMDMVNIRHAKKAQALASDLDYRKRLHEYTVLPEDMKTLWAKKAYGLQSELQYKADLAWMKGVRWLTEGSLNLEQAKKAGQLVSEKNYRQRVDELKFTSVADSSQMEHAKKSQELQSGVAYKAEHEQSVHQYSISKDEPLFLQARANAANLSEKLYKSSWENQKAKAFDLRLDSLAFLAAKAKRDLASEVKYKEDYEKSRGKLIGAQGAQGDSQMSHSLQMSKLQSELEYKKGFEDTKSQCHVPLDMIHLVHARKAQHLATDIGYKTASHHFTALPTDMKVEWAKKAYGLQSDNQYRADVKWMKGTGWVATGSLNVEQAKKAGELISEKKYRQHPDALKFTSIKDTPEMVQARISYTQAVDRLYREQGENLKHHYTQTTDLPEVLLAKLNAMNISETRYKESWSKLRDGGYKLRLDAIPFQAAKASGEIISDYKYKEAFEKMKGQMLGSRSLEDDISLAHSVYASSLQSQVNYKKDFEHSKAQFHLPLDMVTLVHAKKAQTLASDQDYRHPLPQYTSLAEDLRLSCAKRAHKLQSENLYRSDLNFMRGVACVIPGTLEIEGRKRASELISESKYRQHPQSLKYTAVTDTPSLTHAKLSNQITNERLYKAAGEDARHQYTMTLGLPEFVRAKTNAANLSDAKYKESWRNLHAQGYKLTIDALPFQAARVSGDIASDFLYRHDFVKERGRLIGAQSVSDDPRLQHCQRVGQLQSELQYRRQAAGSRAQCHLPMDMVPLVHARKAQALASDLDYRTQCHAFTALPEDLRMAWAKKAHALQSELRYKSDLMGMKGTGWLALSSPQIESAKKAGELISETKYREKPDTIKFTTVVDSPDLVHAKNSYMHCNERLYRSGDAESRHRYTLVPDHPDFTRARLNALNLSDKVYRHSWEQTRAGGYDFRLDAIPFQTARASREIASDFRYKEAFLRDRGLQIGYRSINDDPRTKHFLSVGRLQSDNEYKKDFAKSRSQFHSRPDQPGFLQAKRSQQLASDVHYRQPLPQPTCDPEQLGLKHAQKAHRLQSDVKYKSDLNLTRGIGWTPPGSYKVEMARRAAELANARGLGLQGAYGGPEAVEPRDDQSGFVNPDATEILHVKRRKAPLF

SEQ ID NO: 158 - protein, 1736 aa, Gallus gallus
MNVQPCARCGYGVYPAEKINCIDQTWHKACFHCEVCKMMLTVNNFVSHEKKPYCQVHNPKNNAFTSIFETPINLNAKKLSEVVSEVKYREESEQFKSAFQWDVRSRDIEAAYKAQHLSSQNAYYAAYEGGTSWYSGNMPDPQMVTVTQAQKNLNDLQYTEEYELRQGKGSFPAMITPGYQVAKRATQLSSNVEYRRGHEERVSKFTSVVDTPDILHAKAGGQLASDLKYTEDFEEQRGKGSFPAMITPAYQIAKRANELASDVKYHQTYEKEIKGKASHTAGTDVTFTRENVDQYGQDYMNEYEERRGKGSFPAMITPAYQNAKKANELASDIKYKKDLSKMKGAAHFHSLTAEDNLVLKQAQSANKLVSEVEYKKDLGNNRGYSVNYCDTPQFKNVSKISKYTSDIKYKETYQNQMKGHYMGIGMDKRMLHAMKVGNLASNIAYKSDYKHDGVDYNYPATLTPSYQTTRKLVPLKDVNYRQSIDKMKYSSVASTPEIAQAKINAQQLSDLNYRAQYEKTKTNYTLPQDIPQLVKAKANAELYSEVKYKEGWEKSKGQGFEMKLDSLPLLAAKASRDLASDIKYKEEYEKTKGKAIETKDSRLLHSLQVAKMSSEIAYKKDFEESKTHFHLPMDMVNLRHAKKAQALASDLDYRKRLHEYTVVPEDLKTKWAKKAYGLQSDLQYREDLMWMKGVGCITEGSLNIQQAKKAGDLVSEKKYRQKVDALKFTSVADSSHIKHAKKSQELQSDVAYRSGKEQFLHQYTITKDDPVFLLAKANAANISEKLYRSSWEKQKEKGFVLRLDALSFLTAKAKRDLASDIKYKEGYEKMKGKLIGVKAVEEDSKMAHSLQMSKLQSDLEYKKAFEDTKNQFQVSMDMANLVHAKKAQNLASDKGYRTALHHYTVLPTDRKVAWAKWAYGLQSDNRYRADLNWMKGAGWIATGSLNVEQAKKAGELISEKKYRQHPYALKFTSIKDTPEMIQARISYNQAVDRLYKEHGESIKHQYTLTADLPEILRAKLNTMNISEIRYKESWQKMKDGGYQLRLDAIPFQAAKASGEIISDHKYKEAFEKMKGQMIGSCGLDGDIRIAHSVHASSLQSDVKYKQGFEDTKTHFHLPLDMINLVHARKAQSLVSEQEYRQLLHQYTSLTDDLRLQCAKNAYKLQSENLYRSDMNFMRGVGCITPGALEIEGKKKASELISESKYRQQPHSFKYTSVTDSPGLLHAKFSNMIANERLYKAAGEDIQHHYTPTLGLPEFTQARINAANLSDVKYRESWHNLCAQGYKLTMEALPFQTARASREIASDYQYKHNFVMERGKHIGARSVLDDTRLLHCLHAAKLQSEQEYKKGSQGVWSQYYLPMDMVNLVHARKAQALASDQEYRKRLHEFTALPEDLKMKWAKRAHMLQSEHRYKSDLNFMKGVGWMALRSPQIESVKKAGELISETKYRQKPESLKFTAVVDSPDLIHAKNSYLQCNDRLYKAGDSEARHRYTLPPDHPDFIRARQNALNISDKVYKTSWEQTRASGYDFRIDAIPFQTAKASREIASDYKYREAFLRDRGQRIGFFSANDDAHTRHVLRVGKLQSDNLYRSGYAQNRGHFQSHLNQPGFLHAKRSQQLASNVNYKQPLHQYTCDPEQLNVKHAKQAYKLQSDVKYKSDLNWLRGIGWTPPGSYKVERARRAAELAYLREMGLQAASAQYGPEADQVGPEGSQQVTVNPDASEILQVKRRKMQLYK

SEQ ID NO: 159 - protein, 399 aa, Bos taurus
MTSYSYRQSSSTSSFGGMGGGSMRFGAGGAFRAPSIHGGSGGRGVSVSSARFVSSSSGGYGGGYGGALATSDGLLAGNEKLTMQNLNDRLASYLEKVRALEEANGDLEVKIRDWYQKQGPGPARDYSHYFKTIEDLRDQILGATIENSKIVLQIDNARLAADDFRTKFETEQALRMSVEADINGLRRVLDELTLARTDLEMQIEGLKEELAYLKKNHEEEMSVLKGQVGGQVSVEVDSAPGIDLAKILSDMRSQYEVIAEKNRKDAEAWFISQTEELNREVAGHTEQLQISKTEVTDLRRTLQGLEIELQSQLSMKAALEGTLAETEARFGAQLAQIQALISGIEAQLSDVRADTERQNQEYQHLMDIKTRLEQEIATYRNLLEGQDAYFNDLSLAKAL

SEQ ID NO: 160 - protein, 1467 aa, Bos taurus
MSLVAVPFYQKRHKHFDQSYRNIQTRYLLDEYSAKKKRASAQSSLQRSVTRKSSSQRESSRAALGRTTCRLCAKRMSSALEEEAQERKRRYQSMVAAYGEAKRERYLSELAQLEEDVHVARTHARDQLDRLALQHAVDDRLAWERHSFEERISRAPEILVRLRSHTVWERMSVKLCFTVQGFPTPVVQWYKDGSLICQAGEPGKYRIDSKYGVHTLEINRADFDDTATYSAVATNVHGQVSTNAAVVVRRFRGDEEPFHSVGLPIGLPLSSVIPYTHFDVQFIEKFGVTFRREGETLTLKCTLLVTPDLKRVQPRAEWYRDDVLLKESKWTKMFFGEGQASLSFSHLNKDDEGLYTLRIVSRGGITDHSAFLFVRDADPLVTGAPGAPMDVHCHDVNRDYVIVTWKPPNATKESPVIGYFIDRCEVGTDNWIQCNDAPVKICKYPVTGLFEGRSYIFRVRAVNSAGISRPSRVSEAVAALDPVDLRRLQAVHLEGEKDIVVYQEELEGEVQIPGPPTNVHASETSRTYVVLSWDPPEPRGKEPLMYFIEKSMVGSGSWQRVNAQTAVRSPRYAVFDLAEGKPYVFRVLSANKHGLSDPSEITAPIQAQDTIVVPSAPGRVLASRNTRTSVVVQWDRPKHEEDLLGYYVDCSVAGSNVWEPCNHKPIGYNRFVVHGLTTGEQYIFRVKAVNAVGTSENSQESDVIKVQAALTVPSHPYGITLLNCDGHSMILGWKVPKFSGGSPILGYYVDKREAHHKNWHEVNSSPLKERILTVEGLTEGSLYEFKIAAANMAGIGQPSDPSELFKCEAWTMPEPGPAYDLTFCEVRDTSLVLLWKPPVYSGSSPVSGYFVDYKEEDSGEWLTVHETATPHRYLKVCDLHQGKTYVFRVRAVNASGVGRPSDTSEPVLVEARPGTKEVSAGVDEEGNVYLSFDCPEVTDASHFTWCKSYEDIADDDRFKVETAGDHSKLYFKNLDKEDLGTYSVSVSDTDGVSSSFVLDEEELERLKALSNEIKNPTIPLKSELAYEIFDKGQVRFWLQAEHLSPDSSYRFIINDREVADSETHRIKCDKSTGIIEMVMDRFTIDNEGTYTVQIQDGKAKSQSSLVLIGDAFKAVLKEAEFQRKEFLRKQGPHFAEYLHWDVTEECEVRLVCKVANTKKETVFKWLKDDVLYETEKMPDLEKGVCELLIPKLSKKDHGEYKATLKDDRGQDVSTLEIAGKVYEDMILAMSRVCGASASPLKILCTPEGIRLQCFMKYFTEEMKVNWYHKDAKITSSEHMRIGGNEQMAWLQICEPTEKDKGKYTFEILDGKKNHQRSLDLSGQAFDEAFAEFQQLKAAAFAEKNRGKVIGGLPDVVTIMEGKTLNLTCTVFGNPDPEVVWFKNDKDIELSDHFSVKVEQGKYVSMTIKGVTSEDSGKYSIHVKNKYGGEKIDVTVSVYKHGEEIPDVVLPQQAKPKLLPAAAPSPAH

SEQ ID NO: 161 - protein, 1320 aa, Bos taurus
MQDDSLEASTSISQLLRESYLAETRHRGNNERSRAEPSSNPFHFGGSSGAAEGGGGQDDLPDLSAFLSQEELDESVNLARLAINYDPLEKADEAQARKRFSSDQTKHSSISSFDPNFCQDNSQSPTNSKESLQETKRPQYSSEAQSKKVFLNKAADFIEELSSLFKAHSSKRIRPRACKNHKSKLESQNQVMQENSSSFPDLSERRERSSVPIPIPADTRDNEVNHALEQQEAKRREAEQAAGEAASGDTTPGSSPSSLYYEEPLGQPPRFTQKLRSREVPEGTRVQLDCIVVGIPPPQVRWYCEGKELENSPDIHIIQAGNLHSLTIAEAFEEDTGRYSCFASNIYGTDSTSAEIYIEGVSSSDSEGDPNKDEMNRIQKPNEVSSPPTTSAGIPSAVPQTQHVVVQPRVSTIQQCQSPTNYLQGLDGKPIIAAPVFTKMLQNLSASEGQLVVFECRVKGAPSPKVEWYREGTLIEDSPDFRILQKKPRSMAEPEEICTLVIAEVFAEDSGCFTCTASNKYGTVSSIAQLDVRGNEDLRNNGSLHSANSTTNLALTEQQPSPPNPEPPVEQPPKPKLEGVLVNHNEPRSSSRIGLRVHFNLPEDDKGSEESSEGGVVTTHQTRPDSFQERFNGQSAKISEPSSPVKEPPPVLAKPKLDSSQLQQLHNQVLLEQHHLQNPSPSSPKEFPFNMSVLNSTTVPAVTVSSKHAKAPPSQTFSLARPKHFFPSTSTTVASVSPSSSPVFTLSSTPQAMQRTMSKESLLVTHPSAQTKSLGGASIQNEPLPTPAPTEPAQLPLTFSISSGNQFQPRCVSPAPVSPTGRIQNPVAFLSSVLPSLPAIPPTNAMGLPKSAPSMPSQGLMKKNTKSSHPVSDDYIRETKNAVILDLGKKMNFSDVRSNQQEYKISSFEQRLMNEIEFRLERTPVDESDDEIQHDEIPTGKCIAPIFDKRLKHFRVTEGSPVTFTCKIVGIPVPKVYWFKDGKQISKRNEHFKMKREGDGTCSLHINSTSSDDDGNYTIMAANPQGRISCSGHLMVQGLPIRSRLTAAGQSHRGRSRVQERDKEPLQERFFRPHFLQAPGDMVAHEGRLCRLDCKVSGLPPPELTWLLNGQPVLPDTSHKMLVRETGVHSLLIDPLTQRDAGTYTCIATNKTGQNSFSLELTVVAKEVKKAPVILEKLQNSGVPEGHPVRLECRVIGMPPPVFYWKKDNETIPFTRERISMHQDTTGYVCLLIQPAKKSDAGWYTLSAKNEAGIVSCTARLDIYAQWHHQIPPPMTVRPSGSRYGSLTSKGLDIFSAFSSMESTMVYSCSSRSVVESDEL

SEQ ID NO: 162 - protein, 263 aa, Gallus gallus
MLSHSAMVKERKQQASAIMDEIQRNVSPSLNLGKKVSTPRDIMVEELSTLSNRGARLFKRRQRRSDKYTYENYHYVANKPRNRGEPIHSVKMDGLSVEGIPQHAPMTPPNTPDPRSPPHPDNIAPGYSGPLKEIPPEKFNTTSVPKYYQSPWIEAIRDDPELLEALYPKLFKPEAKPELPDYRSFNRVATPFGGFERASKLVKFKVPDYNLLMLNDPRFMILANPLATRRSFNRTPKGWTSENIPVVFIQPSDSNNVPETEDL

SEQ ID NO: 163 - protein, 264 aa, Sus scrofa
MLSHNTMVKQRKQQASAIMKEIHGNDVDGMDLGKKVSIPRDIMLEELSHLSNRGARLFKMRQRRSDKYTFENFQYESKAQINHNIAMQNGKLDGNNLESGSQQAPFTPPNTPDPRSPPNPENIAPGYSGPLKEIPPERFNTTAVPKYYQSPWEQAISNDPELLEALYPKLFKPEGKAELPDYRSFNRVATPFGGFEKASKIVKFKVPDFELLLLTDPRFMAFANPLSGRRSFNRTPKGWISENIPIVITTEPTEDTTIPESDDL

SEQ ID NO: 164 - protein, 479 aa, Bos taurus
MASPEPRRGGNGSAQAARATRPEVISPLQEENSASLYELGTWNPEVTLSLEGTLNLEDILYLGDTGDLDEALYVEETEPPEETLHIEETRMPDEALYLEEPVRPEAALYVEEPVKLEGVLYVEEPVKTASPEQIVHGGDRVLSEAKSKPKESLQAGPSPSTEGSLSIEDLELLEGRFQQCIEAVAQLEEERDQLIHELVLLREPALQEVQQVHRDILAAYKQHAQAELERDGLREEIRLVKQKLFKVTKECVAYQYQLECRRQDVAQFADFREALTTRAAQLSEELTQLREAYQKQKEQLRQQLEAPQSQRDGHFLQESRRLSAQFESLMAESRQGLEEEYEPQLLRLLERKEAAAKALQKTQAEIQEMKEALRPLQAEAQKLHLQNRNLEDQITLVRQKRDEEVQQYREQLEEMEERQRQLRSGVQLQQQKNKEMEQLRVSLAEELATYKAMLPKSLEQANAPTSEAGGIETPSQGAV

SEQ ID NO: 165 - protein, 323 aa, Gallus gallus
MDAEGAGTPQAPEGTERPCLSLEELGEYFQECIEAVEQLEKERDALIEELTQLREPALQDIRHAHQEIQAACRLLAKVELERDNLRDEIRQIKQKLFKVTKECVACQYQLESRRHDLSQHAAYRDELESQAGRLTGELSRLRESCEKEKEALRQRLEAPPCRQDPQYLQESRRLSAEFESLVTRSRRGLEEHYEPQLLRLLERREAGTRALQELQGEVQGMKEALRPLQGEVSRLRLQNRSLEEQIVLVKQKRDEEVGQYREQVEELEDRLKELKNSVQLQQRKNQELEELRSSLHHELSIYKGCLEIYGHLCKSEEKPDQEC

SEQ ID NO: 166 - protein, 482 aa, Sus scrofa
MASPEPRRGGDGAAQAARETRAEATSPLQEGNSESLYQLGTWNPEVTLSLEGTLNLEDILYLGDPVDLDEALYVEETEKPEETLHIEETRLPDEALYVEEPVKPEEMLYVEETVKPEEIVCVEQTMKPGETTSPEPITYGGETVPSEEKPNPEESLRAKPNPSTDGSLSLEDLELLEGRFQQCVQAVAQLEEERDQLIHELVLLREPALQEVQQVHQDILAAYKLHAQAELERDGLREEIRLVKQKLFKVTKECVAYQYQLECRRQDVAQFADFREVLTARAAQLSEELAQLRDAYQKQKEQLRQQLEAPPSQRDGHFLQESRRLSARFENLMAESRQGLEEEYEPQLLRLLERKEAAAKALQKTQAEIQEMKEALRPLQAEARQLHLQNRNLEDQITLVRQKRDEEVQQYREQLEEMEERQRQLKSGVQLQQQKNKEMEQLRISLAEELSTYKAMLPKSLERASAPTSEAGGIETQSQGAV

SEQ ID NO: 167 - protein, 388 aa, Bos taurus
MAAALIWISLLVGLLEGLGGTEAQQTTLHPLVGRVFVHTLDHESFLQRPEHVFSVSAPIPITYHAHLQGHPDLPRWLRYTQRSPYQPGFLYGTATPEDRGHQIIEVTAYNRDSFNTTQQMLVLLIGDPEGPLLPYQAEFLVRSHDVEEVLPSIPASRFLTALGGLWEPAELQLVNITSALDRGGRVPLPIEGRKEGVYIKVGSASPFSTCLKMVVSPDSHARCAQGQPPLLSCYDTLAPHFRVDWCNVSLVDKSVPEPADEAPAPGDGILEHDPFFCPPTEATNRDFLTDALVTLLVPLLVALLLTLLLAYVMCCRREGRLKRDLATSDIQMVHHRTIRGNTEELRQMASSREVPRPLSTLPMFNVHTGERLPPQVDSAQVPLILDQH

SEQ ID NO: 168 - protein, 291 aa, Bos taurus
MVREQYTTITEGTHIERPENQAVYKIGIYGWRKRCLYLFVLLLLIVLLVNFALTIWILRVMWFSPVGMGHLHVTADGLHLEGESEFLFPLYVKEIRSRVDSSLLLQSTQNVTMNARNTEGEVTGRLKVGPQMVEVQSQQFQIHSKDGKPLFTVDEEKVMVGTDKLRVTGPEGALFEHSVETPLVRPDPPQDLRLESPTRSLSMDAPKGIHIQAPAGKIEALTQMDIVLQSSDGTVVLDAETVCLPELALGSQGPAGSSQGLYEVCVCPDGKLYLSVAGMGTTCHEHSHLCL

SEQ ID NO: 169 - protein, 1135 aa, Gallus gallus
MPVFHTRTIESILEPVAQQISHLVIMHEEGEVDGKAIPDLTAPVSAVQAAVSNLVRVGKETVQTTEDQILKRDMPPAFIKVENACTKLVRAAQMLQADPYSVPARDYLIDGSRGILSGTSDLLLTFDEAEVRKIIRVCKGILEYLTVAEVVETMEDLVTYTKNLGPGMTKMAKMIDERQQELTHQEHRVMLVNSMNTVKELLPVLISAMKIFVTTKNTKSQGIEEALKNRNFTVEKMSAEINEIIRVLQLTSWDEDAWASKDTEAMKRALALIDSKMNQAKGWLRDPNAPPGDAGEQAIRQILDEAGKAGELCAGKERREILGTCKTLGQMTDQLADLRARGQGATPMAMQKAQQVSQGLDLLTAKVENAARKLEAMTNSKQAIAKKIDAAQNWLADPNGGSEGEEHIRGIMSEARKVAELCEEPKERDDILRSLGEISALTAKLSDLRRHGKGDSPEARALAKQIATSLQNLQSKTNRAVANTRPVKAAVHLEGKIEQAQRWIDNPTVDDRGVGQAAIRGLVAEGRRLANVMMGPYRQDLLAKCDRVDQLAAQLADLAARGEGESPQARAIAAQLQDSLKDLKARMQEAMTQEVSDVFSDTTTPIKLLAVAATAPSDTPNREEVFEERAANFENHAARLGATAEKAAAVGTANKTTVEGIQATVKSARELTPQVVSAARILLRNPGNQAAYEHFETMKNQWIDNVEKMTGLVDEAIDTKSLLDASEEAIKKDLDKCKVAMANMQPQMLVAGATSIARRANRILLVAKREVENSEDPKFREAVKAASDELSKTISPMVMDAKAVAGNISDPGLQKSFLDSGYRILGAVAKVREAFQPQEPDFPPPPPDLEHLHLTDELAPPKPPLPEGEVPPPRPPPPEEKDEEFPEQKAGEAINQPMMMAARQLHDEARKWSSKPVTVINEAAEAGVDIDEEDDADVEFSLPSDIEDDYEPELLLMPTNQPVNQPILAAAQSLHREATKWSSKGNDIIAAAKRMALLMAEMSRLVRGGSGNKRALIQCAKDIAKASDEVTRLAKEVAKQCTDKRIRTNLLQVCERIPTISTQLKILSTVKATMLGRTNISDEESEQATEMLVHNAQNLMQSVKETVREAEAASIKIRTDAGFTLRWVRKTPWYQ

SEQ ID NO: 170 - protein, 449 aa, Bos taurus
MEQKAGKSSEDGATVPPAAEAPEPAGSGGSAEEETAGPAESAARAGPATAGQQERAPAEDAVSAECQADGLGEVKAESQGEVELQQEDPGQGETAAAHGKTDRKDQTDSEPEGAEGDRETASASEEQSADEKEARLGSRETVDASREVQAEPKQASGAQEAEAGGGEAEGPQEEGGKTEEPQAEAREEAGAPAAQPDSEPGSPDEEQDQGAGAEAEDGAGGPPSSPEGWPESPTEEGGSASPEGLSPDTAASEELGPSASDSSPSDVPQSPTEPPPSEEKKKEKAPERRVSAPTRPRGPRAQNRKAIVDKFGGAAAGPTALFRNTKAAGAAVGGVRNMLLEWCRAMTRSYEHVDIQNFSSSWGSGMAFCALIHKFFPDAFDYAALDPAQRRHNFTLAFSTAEKLADCAQLLEVDDMVRLAVPDSKCVYTYIQELYRSLVQKGLVKTKKK

SEQ ID NO: 171 - protein, 315 aa, Gallus gallus
MPQNVILPGPAPWGFRLSGGIDFNQPLIITRITPGSKASTANLCPGDIIVAINGLSTENMTHNDAQERIKAAAHQLSLRIERAETKLWSPQVSEDGKANPYKINLEAEPQEFKPIGTAHNRRAQPFVAAANIDDKRQVVSSSYNSPIGLYSSGNIQDALHGQLRSLIPNASQNDPAPTAVPQSDVYRMLHSNQEEPSQPRQSGSFKVLQNLVSEEDGRPVGTRSVKAPVTKIPTGLPGAQKVPQCDKCGSGILGTVVKARDKYRHPECFVCSDCNLNLKQKGYFFVEGQLYCETHARARMRPPEGYEAVTVYPKC

SEQ ID NO: 172 - protein, 1744 aa, Gallus gallus
MDFGSVMNQAATPCSPAVNYELPSPGQSITKQVDTPDATRSPRGGQAHCKASRSMSVTAAMESSCELDLVYITERIIAVSYPSTAEEQSFRSNLREVAHMLKSKHGDNYVLFNLSERRHDISKLHPKVLDFGWPDLHTPALEKICSICKAMDTWLNAAAHNVVVLHNKGNRGRLGVVVAAYMHYSNISASADQALDRFAMKRFYEDKVVPVGQPSQKRYIHYFSGLLSGSIKMNNKPLFLHHVIMHGIPNFESKGGCRPFLKIYQAMQPVYTSGIYNVQGDSQTGICITIEPGLLLKGDILLKCYHKKFRSPTRDVIFRVQFHTCAVHDLDIVFGKEDLDEAFRDERFPEYGKVEFVFSYGPEKIQGMEHLENGPSVSVDYNTSDPLIRWDSYENFNIQREDSAEGTWAEPALPGKHLEKEVGHTQGPLDGSLYAKVKKKDSLHGSIGAVNTARLPLSAAPNHVEHTLSVSSDSGNSTASTKTDRTDEPGAPGAPTGHAVLSPEEKRDVDRLLVGFGLESAAPMHNHAPGPAPARLPAGPGRHVVPAQVHVNGAGTPLLAERETDILDDELPNQDGHSVGSLGTLSSLDGTTTASEAGFHEAPRVGSLSSLPNGPASYNGAEKMLKEGLYEAEPLSNGAYPYSNQNTLMGHHLRDPLAHLRPSRSAQEHLAGYPQRQPASASPAWLQPPVPQPYLYGYDLPSAHRSQSFPAVGTAKYEANLALPQAPARSTSSREAVQRGLNSWQQQGGSRPPSQLHDGGLESHSPSLSSCSPQPSPLQPMPPHSHSMPEFPRAPSRREIEQSIEALDVLMLDLAPSVHKSQSVPSAATRQDKPAAMLSSLSAQRLSGHYAQPTPQVVQPRSFGTSVGTDPLAKPYSPGPLVPAARSTAEPDYTVHEYRETYTPYSYQPVPEPRSYGSAPASILPLSASYSPAGSQQLLVSSPPSPTAPAQSQLPHKGLESYEDLSRSGEEPLNLEGLVAHRVAGVQSREKSPEESTVPARRRTPSDSHYEKSSPEPGSPRSPTVLSPEVVSTIAANPGGRPKEPHLHSYKEAFEEMESASPSSLTSGGVRSPPGLAKTPLSALGLKPHNPADILLHPVGELEGEAGADSEEEPRSYVESVARTATTGRAGNLPAAQPVGLEVPARNGAFGNSFTVPSPVSTSSPIHSVDGASLRSYPSEGSPHGTVTPPHAVAETAYRSPMVSQTPSAHSSYQTSSPSSFQAGTLGSPYASPDYPDGRGGFQPDPQARQQPQVSVVGVHALPGSPRTLHRTVATNTPPSPGFGRRAANPAVASVPGSPGLGRHTVSPHAPPGSPSLARHQMAAVPPGSPMYGYSSPEERRPTLSRQSSASGYQPPSTPSFPVSPAYYPGTSTPHSSSPDSAAYRQGSPTPQPALPEKRRMSAGERSNSLPNYATVNGKASSPLSSGMSSPSSGSAVAFSHTLPDFSKFSMPDISPETRANVKFVQDTSKYWYKPDISREQAIALLKDREPGAFIIRDSHSFRGAYGLAMKVASPPPTVMQQNKKGDITNELVRHFLIETSPRGVKLKGCPNEPNFGCLSALVYQHSIMPLALPCKLVIPDRDPMEEKKDAASTTNSATDLLKQGAACNVLFINSVEMESLTGPQAISKAVAETLVADPTPTATIVHFKVSAQGITLTDNQRKLFFRRHYPLNTVTFCDLDPQERKWTKTDGSGPAKLFGFVARKQGSTTDNVCHLFAELDPDQPAAAIVNFVSRVMLGSGQKR

SEQ ID NO: 173 - protein, 833 aa, Gallus gallus
MSEVGEEQNGGRGAGLGGITAALGLVLIPIPIPILVPVPIPIPIPIPPPQGRKGQSRHRALAGAGPGWGGVRAVTAPGAARCARPRAPQLRPARPERQQQPVSMVEHAEFSKAGKEPGLQIWRIEKFDLVPVPKNLYGDFFTGDSYLVLNTIRQRSGNLQYDLHFWLGDESSQDERGAAAIFTVQMDDYLQGKAVQHREVQGHESSTFLGYFKSGIKYKAGGVASGFRHVVPNEVTVQRLLQVKGRRTVRATEVPVSWESFNTGDCFILDLGSNIYQWCGSNSNRQERLKATVLAKGIRDNERNGRAKVFVSEEGAEREEMLQVLGPKPSLPQGASDDTKTDTANRKLAKLYKVSNGAGNMAVSLVADENPFSQAALNTEDCFILDHGTDGKIFVWKGRSANSDERKAALKTATDFIEKMGYPKHTQVQVLPESGETPLFKQFFKNWRDKDQTEGLGEAYISGHVAKIEKVPFDAATLHTSRAMAAQHGMEDDGSGKKQIWRIEGSEKVPVDPATYGQFYGGDSYIILYDYRHAGKQGQIIYTWQGAHSTQDEIATSAFLTVQLDEELGGSPVQKRVVQGKEPPHLMSMFGGKPLIVYKGGTSREGGQTTPAQTRLFQVRSSTSGATRAVELDPVASQLNSNDAFVLKTPSAAYLWVGRGSNSAELSGAQELLKVLGARPVQVSEGREPDNFWVALGGKAPYRTSPRLKDKKMDAHPPRLFACSNKSGRFTIEEVPGDLTQDDLATDDVMILDTWDQVFVWIGKDAQEEEKTEALKSAKRYIETDPASRDKRTPVTLVKQGLEPPTFSGWFLGWDDDYWSVDPLQRAMADVDV

SEQ ID NO: 174 - protein, 896 aa, Gallus gallus
MTVGCVPQPPFLGRTLLPVLLLAASARCHWPSEPAEVVRDWENQLEASMHSVLSDLRETVPAVVGIPDSSAVVGRFFRVSIPTDLIASNGEAVQVSEAGKESLPSWLHWNAESSSLEGLPLDTDKGVHYISVTTLQPFPNGSYVPQAANVFSVEVHQEDHSEPQSVRAAAQEAGDAAPFVCGAEEPVTILTVILDADLTKMTPKQRIELLNRMRSFSEVELHNMKLVPVVNNRLFDMSAFMAGPGNAKKVVENGALLSWKLGCSLSQNSVPNISKVEAPAKEGTMSARLGYPVVGWHIANKKPHLPKRMRRQINATPTPLTAIGPPTTAAQEPPTRIVPTPTSPAIAPPTETTAPPVREPIPLPRKPTVTIRTRGPIVQTPTLGPIQPTRLVEGTGTVSVPIRPTVPGYVEPTAVITPPTTTTKKPRVSTLKPATPSTTDSSTATTRRPTRRPKTPRPTKPPSTTRSTISKLTTASPPTRVRTTASGVPRPWEPNEPPKLTNHIDRVDAWEGTYFEVKIPSDTFYDKEDTTTDKLQLTLKLKEQQMIEENSWVQFNSTSQLMYGMPDRSHVGKHEYFMYATDKGGLFAVDAFEIHVHKRPHGDKSPVKFKARLEGDHSAVANDIHKKIMLVKKLALAFGDRNSSTITVQDIAKGSIVVEWTNNTLPLEPCPREQIRTLSKKIADDSGGPSPAFSNILQPEFKPLNVSVVGSGSCRHIQFVPVTKDGRVISEATPTLAAGKDPEKSSEDDVYLHTVIPAVVVAAILLVAGIIAMICYRKKRKGKLTIEDQATFIKKGVPIIFADELDDSKPPPSSSMPLILQEEKAPLPPPEYPNQSMPETTPLNQDTIGEYTPLRDEDPNAPPYQPPPPFTAPMEGKGSRPKNMTPYRSPPPYVPP

SEQ ID NO: 175 - protein, 1066 aa, Gallus gallus
MPVFHTRTIESILEPVAQQISHLVIMHEEGEVDGKAIPDLTAPVSAVQAAVSNLVRVGKETVQTTEDQILKRDMPPAFIKVENACTKLVRAAQMLQADPYSVPARDYLIDGSRGILSGTSDLLLTFDEAEVRKIIRVCKGILEYLTVAEVVETMEDLVTYTKNLGPGMTKMAKMIDERQQELTHQEHRVMLVNSMNTVKELLPVLISAMKIFVTTKNTKSQGIEEALKNRNFTVEKMSAEINEIIRVLQLTSWDEDAWASKDTEAMKRALALIDSKMNQAKGWLRDPNAPPGDAGEQAIRQILDEAGKAGELCAGKERREILGTCKTLGQMTDQLADLRARGQGATPMAMQKAQQVSQGLDLLTAKVENAARKLEAMTNSKQAIAKKIDAAQNWLADPNGGSEGEEHIRGIMSEARKVAELCEEPKERDDILRSLGEISALTAKLSDLRRHGKGDSPEARALAKQIATSLQNLQSKTNRAVANTRPVKAAVHLEGKIEQAQRWIDNPTVDDRGVGQAAIRGLVAEGRRLANVMMGPYRQDLLAKCDRVDQLAAQLADLAARGEGESPQARAIAAQLQDSLKDLKARMQEAMTQEVSDVFSDTTTPIKLLAVAATAPSDTPNREEVFEERAANFENHAARLGATAEKAAAVGTANKTTVEGIQATVKSARELTPQVVSAARILLRNPGNQAAYEHFETMKNQWIDNVEKMTGLVDEAIDTKSLLDASEEAIKKDLDKCKVAMANMQPQMLVAGATSIARRANRILLVAKREVENSEDPKFREAVKAASDELSKTISPMVMDAKAVAGNISDPGLQKSFLDSGYRILGAVAKVREAFQPQEPDFPPPPPDLEHLHLTDELAPPKPPLPEGEVPPPRPPPPEEKDEEFPEQKAGEAINQPMMMAARQLHDEARKWSSKGNDIIAAAKRMALLMAEMSRLVRGGSGNKRALIQCAKDIAKASDEVTRLAKEVAKQCTDKRIRTNLLQVCERIPTISTQLKILSTVKATMLGRTNISDEESEQATEMLVHNAQNLMQSVKETVREAEAASIKIRTDAGFTLRWVRKTPWYQ

SEQ ID NO: 176 - protein, 1822 aa, Gallus gallus
MKRKERIARRLEGIENDTQPMLLQNCPGSVTHRLLEEDTPRYMRATDPYSHHLGRSNEEEEASDSSVEKQPRSSRYRTETTGGNTESLYSTGNMDTHELESKAERIARYKAERRRQLAEKYGLSLDSDLDSDYSSRYSRARKDPDSVERKALRSERHDDENKDSGSLYLSRTEVKESKSVLSESREYSSREKDGIPAKEELSNEKSDKRADDDSAIRQASDPSATLDSSVSLTLSGRESSSCNEVPISPKQSPRESLSSPKRAASPIHLQNDQPLHSNIRQSESRFEMSTSGSALSAGGDRERGPRRPRRYFTPGENRKTSERFKTQPITSAERKETDRSIMCAEIPTADDEEKLDDRAKLSVAAKRLLFREMEKSFEMKNIPKPPTRSSAVERRMRRLQDRSHTQPITSEEVVIAATLQASAHQKILAKEEIRAAKEAMGQDQSDEPDSSTLSLAEKMALFNKLSQPVSRAISTRSRGDIRHRRMNTRYQTQPVTLGEVEQVQNESGKLTPLSSTVSTSVSAMASALSALFAGDMHAKSRSDGSVSAATKDELRFHASAESSDSSGKRTQKSEQWQPSMEVLESKRASKKHEEEGKRFLAHEANEIRKYSSFEDETTHPVLEKTGDYHKEAAYSFLRKGSMELFSSQPLFQPLERKEIDTIMQDHVEPTSELTSTPATRTLSQTTAAASCRLQELSEQLEGKFYKNSCEMFSAGENKIQTTEDATDSSSKTMSIKERLALLKKSGEEDWKSRLSKKQEYAKVSATDRSAQMQEVEQLLKKRIADNQESQMTIEERKHLITAREEAWKSRGKGAANDSTQFTVAGRMVKKGLASPSALTPVASPYGNRQKSTTPVTKPLEEIEARPDMQLESDMKLDKLESFLGRLNNKVAGMQETVLTVTGKSVKEVMKLDDDETFSKFYRRVDFPSSSVPLDLDEDFDAIFDPYAPKLISSVAEHKRAVRPMRRVQSSRNPLKMLAAREDILHEYTEQRLNVAFMESKRMKVEKMSANSNFSEVALAGLASKENFSNVSLRSVNLTEQNSNNSAVPYKKLMLLQIKGRRHVQTRLVEPRASSLNSGDCFLLLTPHLCFLWVGEFANVIEKAKASELATLIQTKRELGCRASYIQTIEEGINTHTHAAKDFWKLLGGQANYQSAGRPEEDEMYEAAIIETNCIYRLVEDKLIPEDDYWGKMPKCTLLQPKEVLVFDFGSEVYVWHGKEVTLAQRKVAFQLAKHLWNGTFDYSNCDINPLDPGECNPLIPRKGQGRPDWAVFGRLTEHNETILFKEKFLDWTELKKLNEKNSSESLHQKEESKSDSKPYDVMLMVPVPQTAVGTVLDGMNIGRGYGLVEGEDGRQFEIITASVDVWHILEFDYSRLPKQSIGQFHEGDTYVVKWKYMVSTTVGSRQKGEQQVRAVGKEKCVYFFWQGRHSTVSEKGTSALMTVELDEERGAQVQVLQGKELPCFLQCFQGGMIVHAGRREEEEENAQSDWRLYCVRGEVPNEGNLLEVACHCSSLRSRTSMIVLNINKALIYLWHGCKAQSHTKDVGRTAANKIKEQCPLEAGLHSSSKVTIHECDEGSEPLGFWDALGRRDRKAYDCMLQDPGKFNFTPRLFSLSSSSGEFSATEYVYPSRDPTVINSMPFLQEDLYTAPQPALFLVDNHHEVYLWQGWWPVENKITGSARIRWATDRKCAMETVLQYCKGKNVKKPPKSYLIHAGLEPLTFTNMFPSWEHREDIAEITEMDADVSNQIILVEDVLAKLCKTVYPLADLLARPLPEGVDPLKLEIYLSDEDFEVALEMTREEYNALPSWKQVNLKKAKGLF

SEQ ID NO: 177 - protein, 140 aa, Gallus gallus; identical to SEQ ID NO: 3

SEQ ID NO: 178 - protein, 361 aa, Bos taurus
MEHNGSASNADKIHQNRLSNVTEDEDQDAALTIVTVLDKVAAIVDSVQASQKRIEERHRVMENAIKSVQIDLLKFSQSHSNTGYVINKLFEKTRKVSAHIKDVKARVEKQQTHVKKVEAKQEEIMKKNKFRVVIFQEEVQCPTSLSVVKDRSLTESPEEVDEIFDTPVDLSSDEEYFVEESRSARLKKSGKERIDNIKKAFSKENMQKTRQNFDKKVNRIRTRIVTPERRERLRQSGERLRQSGERLKQSGERFKKSISNAAPSREAFKMRSLRKTKDRAVAEGPEEVREMGVDIIARGEALGPISELYPEALSETDPEEASATHPPQEGGEVSTPEPLKVTFKPQVKVEDDESLLLDLKQ

SEQ ID NO: 179 - protein, 1667 aa, Mus musculus
MSLPFYQRSHQHYDLSYRNKDLRTTMSHYQQEKKRSAVYTHGSTAYSSRSLAARRQESEAFSQASATSYQQQASQTYSLGASSSSRHSQGSEVSRKTASAYDYGYSHGLTDSSLLLEDYSSKLSPQTKRAKRSLLSGEETGSLPGNYLVPIYSGRQVHISGIRDSEEERIKEAAAYIAQKTLLASEEAIAASKQSTASKQSATSKRTTSTLQREETFEKKSRNIAIREKAEELSLKKTLEETQTYHGKLNEDHLLHAPEFIIKPRSHTVWEKENVKLHCSVAGWPEPRLTWYKNQVPINVHANPGKYIIESRYGMHTLEISKCDFEDTAQYRASAMNVQGELSAYASVVVKRYKGELDESLLRGGVSMPLSFAVTPYGYASKFEIHFDDKFDVSFGREGETMSLGCRVVITPEIKHFQPEVQWYRNGAPVSPSKWVQPHWSGDRATLTFSHLNKEDEGLYTIRVRMGEYYEQYSAYVFVRDADAEIEGAPAAPLDVVSLDANKDYIIISWKQPAVDGGSPILGYFIDKCEVGTDTWSQCNDTPVKFARFPVTGLIEGRSYIFRVRAVNKTGIGLPSRVSEPVAALDPAEKARLKSHPSAPWTGQIIVTEEEPTEGVIPGPPTDLSVTEATRSYVVLSWKPPGQRGHEGIMYFVEKCDVGAENWQRVNTELPVKSPRFALFDLVEGKSYRFRVRCSNSAGVGEPSETTEVTVVGDKLDIPKAPGKIIPSRNTDTSVVVSWEESRDAKELVGYYIEASVVGSGKWEPCNNNPVKGSRFTCHGLTTAQSYIFRVRAVNAAGLSEYSQDSEAIEVKAAIGGGVSPDVWPQLSDTPGGLTDSRGGMNGASPPTSQKDALLGSNPNKPSPPSSPSSRGQKEVSTVSESVQEPLSSPPQEAAPEEEQSQSEPPKKKKDPVAVPSAPYDITCLESFRDSMVLGWKQPDTTGGAEITGYYVNYREVVGEVPGKWREANIKAVSDAAYKISNLKENTLYQFQVSAMNIAGLGAPSTVSECFKCEEWTIAVPGPPHSVKLSEVRKNSLVLQWKPPVYSGRTPVTGYFVDLKEASAKDDQWRGLNEAAIVNKYLRVQGLKEGTSYVFRVRAVNQAGVGKPSDLAGPVVAETRPGTKEVVVSVDDDGVISLNFECDQMTPKSEFVWSKDYVPTEDSPRLEVENKGDKTKMTFKDLGTDDLGTYSCDVTDTDGIASSYLIDEEEMKRLLALSQEHKFPTVPTKSELAVEILEKGQVRFWMQAEKLSSNAKVSYIFNEKEIFEGPKYKMHIDRNTGIIEMFMEKLQDEDEGTYTFQIQDGKATGHSTLVLIGDVYKKLQKEAEFQRQEWIRKQGPHFAEYLSWEVTGECNVLLKCKVANIKKETHIVWYKDEREISVDEKHDFKDGICTLLITEFSKKDAGFYEVILKDDRGKDKSRLKLVDEAFQDLMTEVCKKIALSATDLKIQSTAEGIRLYSFVCYYLDDLKVNWSHNGTGIKYTDRVKSGVTGEQIWLQINEPTPNDKGKYVMELFDGKTGHQKTVDLSGQAFDEAFAEFQRLKQAAIAEKNRARVLGGLPDVVTIQEGKALNLTCNVWGDPPPEVSWLKNEKPLTSDDHCSLKFEAGKTAFFTISGVSTADSGKYGLVVKNKYGSETSDFTVSVFIPEEELRKGAMEPPKGNQKSK

SEQ ID NO: 180 - protein, 2335 aa, Bos taurus
QPADMTSATEFENVGNQPPYSRINARWDGPDDELDNDNSSARLFERSRIKALADEREVVQKKTFTKWANSHLVHVSCRITDLYKDLRDGRMLIKLLEVLSGEMLPKPTKGKMRIHCLENVDKALQFLREQRVHLENMGSHDIVDGNHRLVLGLIWTIILRFQIQDIVVQTQEGRETRSAKDALLLWCQMKTAGYPHVNVTNFTSSWKDGLAFNALIHKHRPDLIDFDKLKDSNARHNLEHAFEVAERELGIIPLLDPEDVFTENPDEKSIITYVVAFYHYFSKMKVLAVEGKRVGKVIDHAIETEKMIEKYSGLASDLLTWIEQTITILNSRKFANSLAGVQQQLQAFSTYRTVEKPPKFQEKGNLEVLLFTIQSRMRANNQKVYTPHDGKLVSDINRAWESLEEAEYRRELALRDELIRQEKLEQLARRFDRKAAMRETWLNENQRLVAQDNFGYDLAAVEAAKKKHEAIETDTAAYEERVRALEDLAQELERENYHDQKRIMARKDNILRLWDYLQELLQARRQRLEKTLDLQKLFQDMLHSIDWMDGIKAHLLSAEFGKHLLEVEDLLQKHKLMEADIAIQGDKVKAITTATLQFTEGPGYQPCDPQVIQDRVSHLEQCFEELSNTAAGRKAQLEQSKQLCKFFWEMDEAESWIKEKEQIYSSLDYGKDLTSVLILQRKHKAFEDELRGLDAHLDQIFREAEGMVARKQFGHERIEVRIKKVSDQWNELKDLAAFCKKNLQDTENFFQFQGDADDLKAWLQDAHRLLSGEDVGHDEGATRALGKKHKDFLEELEESRGVMEHLEQQAQAFPQGFQDSPDVTNRLQALRDLYQQVVAQADMRQQRLQDALDLYTVFGETDACELWMGEKGKWLAQMEIPDTLEDLEVVQHRFDILDQEMKTLMTQIDGVNLAANSLVESNHPRSAEVKKYQDRLNTRWQDFQTMVSERREAVDSALRVHNYCVDCEETGKWIADKTKVVESTKDLGRDLAGVIAIQRKLSGLERDVAAIQARLGTLERESQQLMASHPELKEDIEQRQAYVEELWQGLMQALKSQEASLGEASQLQAFLQDLDAFQAWLSTTQKDVASKDMPESLPEAEQLLQQHAAIKDDIDRHQESYQKVRVSGEKVTHGQTDPEYLLLGQRLDGLEKGWDALSRMWESRSQALTQCLGFQEFQKDAKQAEAILSNQEYTLAHLEPPDSLEAAEAGIRKFEDFLLSMENNRDKVLSPVDSGNKLVAEGNLYSDKIKEKVQLIEDRHRKNNEKAQEASDLLKDNLELQNFLQNCQELTLWINDKLLTSQDVSYDEARNLHNKWLKHQAFVAELASHQGWLENIDAEGKQLMEEKPQFAVLVSQKLEALHQLWDELQANTQEMAQHLSAARSSDLRSQTQADLNKWIRAMEDQLQSDDLGKDLTSVNRMLAKLKRVEDQVNVRKEELQELFAQMPSLGEEAGDEALSIEKRFLDLLEPLGRRKKQLESSRAKLQISRDLEDETLWVEERLPLAQSTDYGTNLQTVQLFMKKNQTLQNEILGHTPRVEDVLHRGQQLVAAAEIDCQDVEERLGKLQGSWDTLQEAAASRLQHLREASEAQQYYLDAGEAEAWIGEQEFYVFSDENPQDEESAIVMLKRHLRQQRAVDEYGRNIKQLAGRAQGLLSAGHPEGEQIIRLQGQVDKQYAGLKDMAEERRRKLENMYHLFQLKREVDDLEQWITEKDTVASSSEMGQDFDHVTVLRDKFRDFARETGAIGQERVDNVNAIIERLIDAGHSEAATIAEWKDGLNEMWADLLELIDTRMQLLAASYDLQRYFYTSSEILGLIGEKHRELPEDVGLDASTAESFHRTHTAFERELHLLGEQVQQFQDVAARLQTAYAGEKADIIQNKEQEVSAAWQALLDACAGRRTQLVDTADKFRFFSMARDLLSWMESIVRQIETQEKPRDVSSVELLMKYHQGIQAEIETRSKNFSTCLELGESLLQRQHQASEEIREKREQVVSRREEMQEKWEARWERLRMLLEVCQFFRDASVAEAWLIAQEPYLASRDYGHTVDSVEKLIKRHEAFEKSAASWEGRFAALEKPTTLELKERQTPERTEEEPGLQEEEGETAGEAPRGPHQATTERTSPGEEERPWPQDLQPPPPPGPHEDGQEEKSSTDERPATEPLFKVLDTPLSEGDEPTTLPAQRDRGHSVQMEGFLGRKHDLEGPNKKASNRSWNNLYCVLRNSELAFYKDAKNLALGVPYHGEEPLALRHAICEIAANYKKKKHVFKLRLSNGSEWLFHGKDEEEMLSWLQGVSTAINESQSIRVKAQSLPLPPITGPEASLGKKDKEKRFSFFPKKK

SEQ ID NO: 181 - protein, 1547 aa, Bos taurus
MLSWRLHTGPEKAELQELNARLYDYVCRVRELERENLLLEEELRSRRGQEGLWAEAEARCTEEARGLRRQLDELSWATALAQGERDALRRELRELQLLGEETRAARGRLDAELDSQRRELQEELAARAALEALLGRLQAERRGLDAARERDVRELRARAAGLTLRYRGRVAGPAAPPLRLRELHEDCALLVTEAWRETVQRYEDEVRELEEALRRGRESRREAEEETRLCAQEAEALRREVLELEQLRALLEEELLRVREASELQAEERQREIAYLEDEKAALTLAMADRLRDYQDLVQVKTGLSLEVATYRALLEGESNPEILIVECIENMPQEFREKSYQYTTSVLQKENERNLFPRQKAPPASFRQSLAPRSQTPVRSDARRDVLGSGYSSFTTAWQENAYQKTASGQTNFRTFSPTPGLLRNTEAQLKTFPERPRTEGTKAPPASSAKESAAAAEPYQERRAEEAAAASEGTWSNERTVIWGKKTEAKATKEQERNRPGTIQTKREEKMFDSKEKASEERNLRWEELTKLDKEARKRESEQMREKAREKESLKEESVKGREIPIRLEASQDSTAKVAPQDLQTPLKEDAGDGTGRGVETREAGFTLGASDTTASLKGGSMTETIAENIVSSILKQFTHSPEAEASAESFPDTKVTYVDRKEVPGDRKAKTEIVVESKLTEEIDISDEAGLDYLLSKDAKEVELKGKSAERLIGDVIRLGLKGKEGRAKVVNVEIIEEPMSYVSSEKEDEFSTPFEVEEIDDVSPSSRGLVEEREEAVYGESDVTCSGDAGQEARRPQESVTHVEEVTEAGDLEGEQSYFVSTPDEHPGAPEREEGSVYGQIHIEEESTIRYSWQDEIVPGSRRRVRRDDVPGEKVVKPVDVPEVPLEGDTASAPWKEQTRSGEFHAKPIVIEKEIKIPHEFHTSIKEGSKEPRHQLVEVIEQLEENLPERMKEELSALTREGQGGPAGVSFDVKKVQSAGSGAVTLVAEVNLSQTVDADQLDLEELSKDEAGEIEKAVESVVRDSLARRRSPGPGSPEAEAGGGFRRWATQELYSSSAGEADAGLASPPGPVSATVEVTSPTGFVHAHVLEDVSQSGGRVQIASPGMWRTEQVSAEGRAAQAVEVSAEGQASWAEGSAGTSRSARLITLGARQSPVSTEVIFPGPDAACPEAGGTEEPGPAELPTEPPRFGRHSPFGSQQFYAQREVIFQAPVSGVGKAGDSSQAEESAGTQTSVKHLQLGTREGLTEQTQLTAPLSGAVELGVREASVLMEAWSGDGTSIRHVTIGPQRHQATEPIVPPPLEFSDSESSTHREGSADETLATSSYTVGRNILVTEKSTFQRAVSESPQEASAEDMSGNEVTSGVSRSFRHIQLGPAEAKTSEHIVFHGPISKTFALAGSVDSPEVSEVADSGRTLRHVALGPKETSFTFQMDVSNVEATSRWTQEARVLFPAGTEAEAPSVSEPGAWRDASSRNDLAAGVSFQGSAGDRHQAPGERGKEQAEFDKTVQLQRMVDQRSVISDEKKVALLYLDSQEEENEGHWF

SEQ ID NO: 182 - protein, 4644 aa, Bos taurus
  MOD_RES (1109)..(1109): Any amino acid
MVAGMFMPLDQLRAIYEVLFREGVMVAKKDRRPRSLHPHVPGVTNLQVMRAMASLRARGLVRETFAWRHFYWYLTNEGIAHLRQYLHLPPEIVPASLQRVRRPVAMVMPARRTPHVQAVQGPLGCPPKRGPPPTEDPAREERCVYRRKEPEEGAPEPPVVPAATPGTLARQGLEPAPPTDERDRVQKKTFTKWVNKHLIKAQRHISDLYEDLRDGHNLISLLEVLSGDSLPREKGRMRFHKLQNVQIALDYLRHRQVKLVNIRNDDIADGNPKLTLGLIWTIILHFQISDIQVSGQSEDMTAKEKLLLWSQRMVEGYQGLRCDNFTSSWRDGRLFNAIIHRHKPMLIDMNKVYRQTNLENLDQAFSVAERDLGVTRLLDPEDVDVPQPDEKSIITYVSSLYDAMPRVPDVQDGVKANELQLRWQEYRELVLLLLQWIRAHTAAFEERRFPSSFEEIEILWCQFLKFKETELPAKEADKNRSKGIYQSLEGAVQAGQLKVPPGYHPLDVEKEWGKLHVAILEREKQLRSEFERLERLQRIVSKLQMEAGLCEEQLNQADALLQSQDVRLLAAGKAPQRAGEVERDLDKADGMIRLLFNDVQALKDGRHPQGEQMYRRVYRLHERLVAIRTEYNLRLRGTPRHPELEDSTLRYLQDLLAWVEENQRRLDGAEWGVDLPSVEAQLGSHRGLHQSVEEFRAKIERARTDEGQLSPATRGAYRDCLGRLDLQYAKLLNSSKARLRSLESLHGFVAAATKELMWLSEKEEEEVGFDWSERNSNMAAKKEAYSALMRELELKEKKIKEIQSTGDRLLREDHPARPTVESFQAALQTQWSWMLQLCCCIEAHLKENTAYFQFFSDVREAEEQLRKLQETLHRKYTCDRSITVTRLEDLLQDAQDEKDQLNEYRGHLSGLAKRAKAIVQLTPRNPTQPTRGRVPLLAVCDYKQVEATVHKGDECQMLGPAQPFHWKVLSGSGSEAAVPSVCFLVPPPNQEALEAVARLEAQHQALVTLWHQLHTDMKSLLAWQSLSRDVQLIRSWSLVTFRTLKPEEQRQALRSLELHYQAFLRDSQDAGGFGPEDRLQAEREYGSCSRHYQQLLQSLEQGKCGQCGXLDKEPARECAQRIAEQQKAQAEVEGLGKGVARLSAEAEKVLALPEPSPAAPTLRSELELTLGKLEQVRSLSAIYLEKLKTISLVIRSTQGAEEALKAHEEQLKEAQAVPAALPELEATKAAMKKLRAQAEAQQPVFDALRDELRGAQEVGERLQQRHGERDVEVERWRERVTQLLERWQAVLAQTDVRQRELEQLGRQLRYYRESADPLGAWLQDARRRQEQIQAVPLADSQAVREQLRQEKALLEEIERHAEKVEECQRFAKQYINAIKDYELQLVTYKAQLEPVASPAKKPKVQSGSESVIQEYVDLRTRYSELSTLTSQYIRFISETLRRMEEEERLAEQQRAEERERLAEVEAALEKQRQLAEAHAQAKAQAEREAQELQRRMQEEVARREEVVVDAQQQKRSIQEELQQLRQSSEAEIQAKARQVEAAERSRLRIEEEIRVVRLQLETTERQRGGAEGELQALRARAEEAEAQKRQAQEEAERLRRQVQDETQRKRQAEAELGLRVKAEAEAAREKQRALQALEELRLQAEEAERRLRQAEAERARQVQVALETAQRSAQAELQSKHASFAEKTAQLERTLEEEHVTVVQLREEATRREQQQAEAERAREEAERELERWQLKANEALRLRLQAEEVAQQKSLAQAEAEKQKEAAEREARRRGKAEEQAVRQRELAEQELERQRQLAEGTAQQRLAAEQELIRLRAETEQGEQQRQLLEEELARLQSEAAAATQKRQELEAELAKVRAEMEVLLASKARAEEESRSSSEKSKQRLEAEAGRFRELAEEAARLRALAEEAKRQRQLAEEDAARQRAEAERVLSEKLAAISEATRLKTEAEIALKEKEAENERLRRLAEDEAFQRRRLEEQAAQHKADIEERLAQLRKASESELERQKGLVEDTLRQRRQVEEEILALKASFEKAAAGKAELELELGRIRGNAEDTLRSKEQAEQEAARQRQLAAEEERRRREAEERVQKSLAAEEEAARQRKAALEEVERLKAKVEEARRLRERAEQESARQLQLAQEAAQKRLQAEEKAHAFAVQQKEQELQQTLQQEQSMLERLRGEAEAARRAAEEAEEARERAEGEAAQSRQRVEEAERLKQAAEEQAQAQAQAQAAAEKLRKEAEQEAARRAQAEQAALRQKQAADAEMEKHKKFAEQTLRQKAQVEQELTALRLKLEETDHQKSILDQELQRLKAEVTEAARQRSQVEEELFSVRVQMEELGKLKARIEAENRALILRDKDNTQRLLQEEAEKMKQVAEEAARLSVAAQEAARLRQLAEEDLAQQRALAEKMLKEKMQAVQEATRLKAEAELLQQQKELAQEQARRLQEDKEQMAQQLAQETQGFQRTLETERQRQLEMSAEAERLRLRVAEMSRAQARAEEDAQRFRKQAEEISAKLHRTELATQEKVTLVQTLETQRQQSDRDADRLREAIAELEREKDKLKKEAELLQLKSEEMQTVQQEQLLQETQALQQSFLSEKDSLLQRERFIEEEKAKLERLFQDEVAKAQKLREEQQRQQQQMQQEKQQLLASMEEARRRQREAEEGVRRKQEELQLLEQQRQQQEQLLAEENRRLRERLEHLEEEHRAALAHSEEITAAQAAATRALPNGQDATDGPAAEPEHAFEGLRQKVPAQQLQEAGILSTEEVQRLVQGHTTVAELTQREDVRRYLQGHSSIAGLLLKPANEKLTIYAALRRQLLSPGTAVILLEAQAASGFLLDPVRNRRLTVNEAVKEGVVGPELHHKLLSAERAVTGYKDPYTGEQISLFQAMKKDLIVREHGIRLLEAQIATGGVIDPVHSHRVPVDVAYQRGYFDEEMNRVLQDPSDDTKGFFDPNTHENLTYLQLLERCVEDPETGLRLLPLTDQAAKGGELVYTDSEARDVFEKATVSAPFGKFQGKTVTIWELINSEYFTAEQRRDLLRQFRTGKVTVEKIIKIVITVIEEHEQKGQLCFQGLRALVPAAELLESGVIDWDLFRQLQLGERSVQEVAEVEAVRRALRGSGVIAGVWLEEARQKLSIYEALKKELLQPEAAVALLEAQAGTGHVIDPATSARLTVDEAVRAGLVGPELHEKLLSAEKAVTGYKDPYSGQSVSLFQALKKGLIPREQGLRLLDAQLSTGGIVDPSKSHRLPLDVACARGYLDKETSTALTAPRDDAKTYYNPRTWEPATYSQLQQQCRPDPLTGLSLLPLSEEAARARQQELYSEVQAREAFQKATVEVPVGSFQGRAVTIWELINSEYFTAEQRQELLRQFRTGKVTVEKIIKIIITIVEEVETTRRERLSFSGLRAPVPASELLASGILSSSQFEQLKDGKTSVKDLSELDSVRTLLQGSGCLAGIYLEESKEKVTIYEAMRRGLLRPSTAILLLEAQAATGFLVDPVRNQRLYVHEAVKAGVVGPELHEKLLSAEKAVTGYKDPYSGSTISLFQAMKKGLVVREHGIRLLEAQIATGGIIDPVHSHRVPVDVAYQRGYFDKEMNRVLEDPSDDTKGFFDPNTRENLTYRQLLERCVEDPETGLRLLPLKGPEKAEVVETTRVYTEEETRRAFEETQIDIPGGGSHGGSTMSLWEVMQSDLIPEEQRAQLMADFQAGRVTKERMIIIIIEIIEKTEIVRQQNLASYDYVRRRLTAEDLHEARVISRESYSLLREGTRSLREVLEAESAWRYLYGTGCVAGVYLPGSRQTLTIYQALKKGLLSAEVARLLLEAQAATGFLLDPVKGDRLTVDEAVRKGLVGPELHDRLLSAERAVTGYRDPYTEQTISLFQAMKKDLIPAEEALRLLDAQLATGGIVDPRLGFHLPLEVAYQRGYLNKDTHDQLSEPSEVRSYIDPSTDERLSYTQLLRRCRRDEASGLFLLPLSDARKLTFRGLRKQITVEELVRSHVMDEATAQRLQEGLTSIEEVSKNLQKFLEGTSSIAGVLVDATKERLSVYQAMKKGIIRPGTAFELLEAQAATGYVIDPIKGLKLTVEEAVRMGIVGPEFKDKLLSAERAVTGYKDPYSGKLISLFQAMKKGLILKDHGIRLLEAQIATGGIIDPEESHRLPVDVAYQRGLFDEEMNEILTDPSDDTKGFFDPNTEENLTYLQLMERCVTDPQTGLRLLPLKEKKRERKTSSKSSVRKRRVVIVDPETGKEMSVYEAYRKGLIDHQTYLELSEQECEWEEITISSSDGVVKSMIIDRRSGRQYDIDEAIAKSLIDRSALDQYRAGTLSITEFADMLSGNAGGFRSRSSSVGSSSSYPISPAVSRTQLASWSDPTEETGPVAGILDTETLEKVSITEAMHRNLVDNITGQRLLEAQACTGGIIDPNTGERFPVTEAVNKGLVDKIMVDRINLAQKAFCGFEDPRTKTKMSAAQALKKGWLYYEAGQRFLEVQYLTGGLIEPDTPGRVPLDEALQRGTVDARTAQKLRDVSAYSKYLTCPKTKLKISYKDALDRSMVEEGTGLRLLEAATQSSKGYYSPYSVSGSGSTTGSRSGSRTGSRAGSRRGSFDATGSGFSMTFSSSSYSSSGYGRRYASGPTSSLGGPESTAA

SEQ ID NO: 183 - protein, 1116 aa, Rattus norvegicus
MARIPRCDFLGLPGICYLLSFLLAGLLLPRASAFNLDVMGAIRKEGEPGSLFGFSVALHRQLQPRPQSWLLVGAPQALALPGQQANRTGGLFACPLSLEETDCYRVDIDRGANVQKESKENQWLGVSVRSQGAGGKVVTCAHRYESRQRVDQVLETRDVIGRCFVLSQDLAIRDELDGGEWKFCEGRPQGHEQFGFCQQGTAATFSPDSHYLIFGAPGTYNWKGLLFVTNIDSSDPDQLVYKTLDPADRLTGPAGDLTLNSYLGFSIDSGKGLMRSEELSFVAGAPRANHKGAVVILRKDSASRLIPEVVLSGERLTSGFGYSLAVTDLNSDGWADLIVGAPYFFERQEELGGAVYVYMNQGGHWADISPLRLCGSPDSMFGISLAVLGDLNQDGFPDIAVGAPFDGDGKVFIYHGSSLGVVTKPSQVLEGEAVGIKSFGYSLSGGLDVDGNHYPDLLVGSLADTAALFRARPVLHVSQEIFIDPRAIDLEQPNCADGRLVCVHVKVCFSYVAVPSSYSPIVVLDYVLDGDTDRRLRGQAPRVTFPGRGPDDLKHQSSGTVSLKHQHDRVCGDTVFQLQENVKDKLRAIVVTLSYGLQTPRLRRQAPDQGLPLVAPILNAHQPSTQRTEIHFLKQGCGDDKICQSNLQLAQAQFCSRISDTEFQALPMDLDGTALFALSGQPFIGLELTVTNLPSDPARPQADGDDAHEAQLLATLPASLRYSGVRTLDSVEKPLCLSNENASHVECELGNPMKRGTQVTFYLILSTSGITIETTELKVELLLATISEQDLHPVSVRAHVFIELPLSISGVATPQQLFFSGKVKGESAMRSERDVGSKVKYEVTVSNQGQSLNTLGSAFLNIMWPHEIANGKWLLYPMRVELEGGQGPEKKGICSPRPNILHLDVDSRDRRRRELGQPEPQEPPEKVEPSTSWWPVSSAEKRNVTLDCAQGTAKCVVFSCPLYSFDRAAVLHVWGRLWNSTFLEEYMSVKSLEVIVRANITVKSSIKNLLLRDASTVIPVMVYLDPVAVVAEGVPWWVILLAVLAGLLVLALLVLLLWKCGFFRRNSPSSSFPANYHRAHLAVQPSAMEAGGPGTVGWDSSSGRSTLRPLYPSTTQ

SEQ ID NO: 184 - protein, 801 aa, Bos taurus
MNLQLIFWIGLISSVCCVFGQADENRCLKANAKSCGECIQAGPNCGWCTNSTFLQEGMPTSARCDDLEALKKKGCHPNDIENPRGSKDIKKNKNVTNRSKGTAEKLQPEDITQIQPQQLVLQLRSGEPQTFTLKFKRAEDYPIDLYYLMDLSYSMKDDLENVKSLGTDLMNEMRRITSDFRIGFGSFVEKTVMPYISTTPAKLRNPCTNEQNCTSPFSYKNVLSLTDKGEVFNELVGKQRISGNLDSPEGGFDAIMQVAVCGSLIGWRNVTRLLVFSTDAGFHFAGDGKLGGIVLPNDGQCHLENDVYTMSHYYDYPSIAHLVQKLSENNIQTIFAVTEEFQPVYKELKNLIPKSAVGTLSANSSNVIQLIIDAYNSLSSEVILENSKLPEGVTINYKSYCKNGVNGTGENGRKCSNISIGDEVQFEISITANKCPNKNSETIKIKPLGFTEEVEIILQFICECECQGEGIPGSPKCHDGNGTFECGACRCNEGRVGRHCECSTDEVNSEDMDAYCRKENSSEICSNNGECVCGQCVCRKRDNTNEIYSGKFCECDNFNCDRSNGLICGGNGVCKCRVCECNPNYTGSACDCSLDTTSCMAVNGQICNGRGVCECGACKCTDPKFQGPTCEMCQTCLGVCAEHKECVQCRAFNKGEKKDTCAQECSHFNITKVENRDKLPQPGQVDPLSHCKEKDVDDCWFYFTYSVNGNNEATVHVVETPECPTGPDIIPIVAGVVAGIVLIGLALLLIWKLLMIIHDRREFAKFEKEKMNAKWDTQENPIYKSPINNFKNPNYGRKAGL

SEQ ID NO: 185 - protein, 803 aa, Gallus gallus
MAETNLTLLTWAGILCCLIWSGSAQQGGSDCIKANAKSCGECIQAGPNCGWCKKTDFLQEGEPTSARCDDLAALKSKGCPEQDIENPRGSKRVLEDREVTNRKIGAAEKLKPEAITQIQPQKLVLQLRVGEPQTFSLKFKRAEDYPIDLYYLMDLSYSMKDDLENVKSLGTALMREMEKITSDFRIGFGSFVEKTVMPYISTTPAKLRNPCTGDQNCTSPFSYKNVLSLTSEGNKFNELVGKQHISGNLDSPEGGFDAIMQVAVCGDQIGWRNVTRLLVFSTDAGFHFAGDGKLGGIVLPNDGKCHLENNMYTMSHYYDYPSIAHLVQKLSENNIQTIFAVTEEFQAVYKELKNLIPKSAVGTLSSNSSNVIQLIIDAYNSLSSEVILENSKLPKEVTISYKSYCKNGVNDTQEDGRKCSNISIGDEVRFEINVTANECPKKGQNETIKIKPLGFTEEVEIHLQFICDCLCQSEGEPNSPACHDGNGTFECGACRCNEGRIGRLCECSTDEVNSEDMDAYCRRENSTEICSNNGECICGQCVCKKRENTNEVYSGKYCECDNFNCDRSNGLICGGNGICKCRVCECFPNFTGSACDCSLDTTPCMAGNGQICNGRGTCECGTCNCTDPKFQGPTCEMCQTCLGVCAEHKDCVQCRAFEKGEKKETCSQECMHFNMTRVESRGKLPQPVHPDPLSHCKEKDVGDCWFYFTYSVNSNGEASVHVVETPECPSGPDIIPIVAGVVAGIVLIGLALLLIWKLLMIIHDRREFAKFEKEKMNAKWDTGENPIYKSAVTTVVNPKYEGK

SEQ ID NO: 186 - protein, 798 aa, Sus scrofa
MNLQLIFWIGLISSVCYVFGQADENRCLKANAKSCGECIQAGPNCGWCTNSTFLQEGMPTSARCDDLEALRKKGCHPDDIENPRGSKNIKKNKNVTNRSKGTAEKLQPEDITQIQPQQLVLQLRSGEPQTFTLKFKRAEDYPIDLYYLMDLSYSMKDDLENVKSLGTDLMNEMRRITSDFRIGFGSFVEKTVMPYISTTPAKLRNPCTSEQNCTSPFSYKNVLSLTDKGEVFNELVGKQRISGNLDSPEGGFDAIMQVAVCGSLIGWRNVTRLLVFSTDAGFHFAGDGKLGGIVLPNDGHCHLENDVYTMSHYYDYPSIAHLVQKLSENNIQTIFAVTEEFQPVYKELKNLIPKSAVGTLSANSSNVIQLIIDAYNSLSSEVILENSKLPEGVTINYKSYCKNGVNGTGENGRKCSNISIGDEVQFEISITANKCPNKNSETIKIKPLGFTEEVEIILQFICECECQSEGIPSSPKCHDGNGTFECGACRCNEGRVGRHCECSTDEVNSEDMDAYCRKENSSEICTNNGECVCGQCVCRKRDNTNEIYSGKFCECDNFNCDRSNGLICGGNGVCKCRVCECNPNYTGSACDCSLDTTSCMAVNGQICNGRGVCECGVCKCTDPKFQGPTCEMCQTCLGVCAEHKECVQCRAFNKGEKKDTCAQECSHFNITKVENRDKLPQPGQVDPLSHCKEKDVDDCWFYFTYSVNGNNEATVHVVETPECPTGPDIIPIVAGVVAGIVLIGLALLLIWKLLMIIHDRREFAKFEKEKMNAKWDTGENPIYKSAVTTVVNPKYEGK

SEQ ID NO: 187 - protein, 357 aa, Bos taurus
WQKHLAGRGWGPWHIKPPGPAEAGCDGTMADSEEVQRATALIEERLAQEEENEKLRGTTHQKLPMEMLVLEDEKHHRPESPSLQKVKGQERVRKTSLDLRREIIDVGGIQNLIQLRKKRKQKKREALAASQEPPPEPEEITGPVDEETFLKAAVEGKMKVIEKFLADGGSPDTCDQFRRTALHRASLEGHMEILEKLLESGATVDFQDRLDCTAMHWACRGGHLEVVRLLQSRGADTNVRDKLLSTPLHVAVRTGQVEIVEHFLSLGLDINAKDREGDSALHDAVRLNRYKIIKLLLLHGADMMSKNLAGKTPTDLVQLWQADTRHALENPEPGSEQNGLEGSTESGRETPQPVAAE

SEQ ID NO: 188 - protein, 2043 aa, Gallus gallus
MAAPAPPAPGGGTSPPAGPPRLRQSDSNASFLRAARAGNLDKVVEYLKSGIDINTCNQNGLNALHLAAKEGHVGLVQELLERGSAVDSATKKGNTALHIASLAGQAEVVKVLVKEGANINAQSQNGFTPLYMAAQENHIEVVKYLLENGANQSTATEDGFTPLAVALQQGHNQAVAILLENDTKGKVRLPALHIAARKDDTKSAALLLQNDHNADVQSKMMVNRTTESGFTPLHIAAHYGNVNVATLLLNRGAAVDFTARNGITPLHVASKRGNTNMVKLLLDRGGQIDAKTRDGLTPLHCAARSGHDQVVELLLERGAPLLARTKNGLSPLHMAAQGDHVECVKHLLQHKAPVDDVTLDYLTALHVAAHCGHYRVTKLLLDKRANPNARALNGFTPLHIACKKNRIKVMELLVKYGASIQAITESGLTPIHVAAFMGHLNIVLLLLQNGASPDVTNIRGETALHMAARAGQVEVVRCLLRNGALVDARAREEQTPLHIASRLGKTEIVQLLLQHMAHPDAATTNGYTPLHISAREGQVDVASVLLEAGASHSMSTKKGFTPLHVAAKYGSLEVAKLLLQRRASPDSAGKNGLTPLHVAAHYDNQKVALLLLEKGASPHATAKNGYTPLHIAAKKNQMQIATTLLNYGAETNILTKQGVTPLHLASQGGHTDMVTLLLEKGSNIHVATKTGLTSLHLAAQEDKVNVAEILTKHGANQDAQTKLGYTPLIVACHYGNIKMVNFLLKQGANVNAKTKNGYTPLHQAAQQGHTHIINVLLQHGAKPNAITTNGNTALAIARRLGYISVVDTLKVVTEEITTTTTTVTEKHKLNVPETMTEVLDVSDEEAFKHSDDERFSDGEVYNGTGVISRNSWSDDTMTGDGGEYLRPEDLKELGDDSLPSSQFLDGMNYLRYSLEGGRSDSLRSFSSDRSHTLSHASYLRDSAMIDDTVVIPSQQVTTLAKEAERNSYRLSWGPENLDNVALSSSPIHSGCSSPCLDHDNSSFLVSFMVDARGGAMRGCRHNGLRIIIPPRKCTAPTRVTCRLVKRHRLATMPPMVEGEGLASRLIEVGPSGAQFLGPVIVEIPHFAALRGKERELVILRSENGDSWKEHFCEYTEDELNEILNGMDEVLDTPEELEKKRICRIITRDFPQYFAVVSRIKQDSNLIGPEGGVLSSTVVPQVQAVFPEGALTKRIRVGLQAQPMHTELIKKILGNKATFSPIVTLEPRRRKFHKPITMTIPVPKASSDGIMNGYGGDTPTLRLLCSITGGTTPAQWEDITGTTPLTFVNECVSFTTNVSARFWLIDCRQTQESVTFASQVYREIICVPYMAKFVVFAKSHDPIEARLRCFCMTDDKVDKTLEQQENFAEVARSRDVEVLEGKPIYVDCFGNLVPLTKSGQHHIFSFFAFKENRLPLFVKVRDTTQEPCGRLSFMKEPKSTRGLVHQAICNLNITLPVYTKESESDQEQEEEVDMTSEKNQQDDRERTEERLAHIADHLGFSWTELARELDFTEEQIHQIRIENPNSLQDQSHALLKYWLERDGKHATDTSLTQCLTKINRMDIVHLMETSGIDSMQVHGTRTYTEIEQTIGLDHSEGFSVLQEELYSSRHKPDERHRISKDGDPTEHPPIVSEEDVSVSYSPFQDSTPRSEAELSMAELLRQTHKEQVEAEFSGKPQDVIETTSSQHEYFVTTPGTEQRAASDTSARFSATKEEREKTSPQSPSSAQRGGSPIIQEPEELHLHQDDPSPRRTSLVIVESIDEQPEKLGSGYEEESLEKELAEELGELENSSDEDEMVTTRVVRRRVIIQADSMPEMPPETVTEEQYTDEHGHTVVKKVTRKIIRRYVSPDGTEKEDIIMQGTPQKPVTVEEGDGYSKVVKRVVLKSDSEQSEVTLSEPGVLPSASNFQSEPVEGRKVSKVIKTTVVQGERMEKHLGDASLATDLPSAKEDFEEALSYTGNQIKIQLPALVEKEIMKEDGSIIKRTTLSKASTQKRTVMKDRYGKHVHIEELDDTPEALPQDDLQHDLQQLLRHFCKEDWKQEAK

SEQ ID NO: 189 - protein, 3905 aa, Sus scrofa
EGQSQDKGSKSGSSIQSLFFFSQSDSNASFLRAARAGNLDKVVEYLKGGIDINTCNQNGLNALHLAAKEGHVGLVQELLGRGSSVDSATKKGNTALHIASLAGQAEVVKVLVKEGANINAQSQNGFTPLYMAAQENHIDVVKYLLENGANQSTATEDGFTPLAVALQQGHNQAVAILLENDTKGKVRLPALHIAARKDDTKSAALLLQNDHNADVQSKMMVNRTTESGFTPLHIAAHYGNVNVATLLLNRGAAVDFTARNGITPLHVASKRGNTNMVKLLLDRGGQIDAKTRDGLTPLHCAARSGHDQVVELLLERGAPLLARTKNGLSPLHMAAQGDHVECVKHLLQHKAPVDDVTLDYLTALHVAAHCGHYRVTKLLLDKRANPNARALNGFTPLHIACKKNRIKVMELLVKYGASIQAITESGLTPIHVAAFMGHLNIVLLLLQNGASPDVTNIRGETALHMAARAGQVEVVRCLLRNGALVDARAREEQTPLHIASRLGKTEIVQLLLQHMAHPDAATTNGYTPLHISAREGQVDVASVLLEAGAAHSLATKKGFTPLHVAAKYGSLDVAKLLLQRRAAADSAGKNGLTPLHVAAHYDNQKVALLLLEKGASPHATAKNGYTPLHIAAKKNQMQIASTLLNYGAETNIVTKQGVTPLHLASQEGHTDMVTLLLDKGANIHMSTKSGLTSLHLAAQEDKVNVADILTKHGADQDAHTKLGYTPLIVACHYGNVKMVNFLLKQGANVNAKTKNGYTPLHQAAQQGHTHIINVLLQHGAKPNATTANGNTALAIAKRLGYISVVDTLKVVTEEVTTTTTTITEKHKLNVPETMTEVLDVSDEEGDDTMTGDGGEYLRPEDLKELGDDSLPSSQFLDGMNYLRYSLEGGRSDSLRSFSSDRSHTLSHASYLRDSAMIDDTVVIPSHQVSALAKEAERNSYRLSWGTENLDNVALSSSPIHSGFLVSFMVDARGGAMRGCRHNGLRIIIPPRKCTAPTRVTCRLVKRHRLATMPPMVEGEGLASRLIEVGPSGAQFLGKLHLPTAPPPLNEGESLVSRILQLGPPGTKFLGPVIVEIPHFAALRGKERELVVLRSENGDSWKEHYCEYTEDELNEILNGMDEVLDSPEDLEKKRICRIITRDFPQYFAVVSRIKQDSNLIGPEGGVQAVFPEGALTKRIRVGLQAQPMHSELVKKILGNKATFSPIVTLEPRRRKFHKPITMTIPVPKASSDVMLNGFGGDAPTLRLLCSITGGTTPAQWEDITGTTPLTFVNECVSFTTNVSARFWLIDCRQIQESVTFASQVYREIICVPYMAKFVVFAKSHDPIEARLRCFCMTDDKVDKTLEQQENFAEVARSRDVEVLEGKPIYVDCFGNLVPLTKSGQHHIFSFFAFKENRLPLFVKVRDSTQEPCGRLSFMKEPKSTRGLVHQAICNLNITLPIYTKESESDQEQEEEVIVRHYDETESTETSVLKSHLVNEVPVLASPDLLSEVSEMKQDLIKMTAILTTDVSDRAGSLKVKELVKAAEEEPGEPFEIVERVKEDLEKVNEILRSGTCAGDEGSEPRSQPEREVVEEEWVIVSDEEIEEAKRKAPLEITEYPCVEVRLDKDTKVKVEKDSLGLVNYLTEDLNSYVPPHGEPLQMEREKQEALGPGRSSESEGKDAPSEETQSTQKQPKPSLGIKKPVRRKLKDKQKQKEDSSQASADKSELKKGSSEESLDEDTGLAPEPLPAVKATSPLIEETPIGSIKDKVKALQKRVEDEQKGRSKLPVRVKGKEDVPKKITHRTQLAASPSLKSERHALASKPERHSSLSSPAKTERHPPVSPSSKTEKHSPVSPSAKTERHSPVSSSSKTEKHSPVSPSTKPDRHSPVSSATKTERHPPVSPSGKTDKRPPVSPSGRTEKHPPVSPGRTEKRLPVSPAGRMERHSPMSTSGKTEKHLPVSPSGKTDKQPPVSPTSKTERIEETMSVRELMKAFQSGQDPSKHKTGLFEHKSAKQKQPQEKGKVRGEKEKGLTVTQKETQKTETQTIKRSQRFLVTGPQNPEEQPVVKREEGAGERGKALNHKTPEPVQSAPEEESHKVESPKEKLADEQGDMDLQISPDRKTSTDFSDVIKQELEDNDKYQEFCHNQVLTSPFNTTFPLDYMKEEFLPALSLQSGALDGSSESLKHEGAAGSPCGSLMEGTPQISSEESYKHEGLAETPETSPESLSFSPKKTEEQTEETKETTKVESPPEIHSEKEDPSTKDVTDSSAGQGAVVTGGTEPSAECLLKEATLEPSKDTCPQPEDEGLDSQGESLAKETPKGLTEGVPHGEDPLTHVSSAHEKQTDTEAQKSTASKPSDETAASPLPDAVVKTSPGTESKPQGVIRSPQGLELALPSRDSEVFSPGADESFAVSHKDSLEASPVLEDNSSHKTPDSLEPSPLKESPCRDSLESSPVEPKMKAGILPSQFPLPSAVAKTELITEVASMRSRLLRDPDGSAEDDSLEQTSLMESSGKSPLSPDTPSSEEISYEVTPKTTDAGTPKPAVIPECAEEDDLENGEKKRFTPEEEMFKMVTKIKISKQKRDYKKEPKQEDSSSSSDADVECSADLDEPKCMESVEDKSNAPVVVTAESRKASSSSESEPELTQLKKGADSGLLPEPVIRVQPPSPLPSSIDSNSSPEEVQFQPIVSKQYTFKMNEDTQEDSGKSEEEEGCESHLPEDSHTVSTSGPEMSYDDVNRDADQPKICGSYGCEAESPSSSAIPVTLGLHSSTGEDVHEQLVIHKEPLALQDTGEKDTEGEELDVSRVEAPQVGYPTESSSSSSSLPHCPASEGKELDEDVVSTSSATKMEVTKADQAFESLPDDYSTQDLPNTTQTDSSSLDVPVSDPTETDDISDPQVTSPYENVPSQSFFSSEESKTQTDTRHTSFHSSEVCSVTTTSSVEEVVVTSSSGRTVSSQESNLEDQNLECKQESPLCEVQPDGAPSSLEPAAPTTSTVVGEQISKVIITKTDVDSDSWSEIREDDEAFEARVKEEEQKIFGLMVDRQSQGTTPDTTPARTPTEEGTPTSEQNPFLFQEGKLFEMTRSGAIDMTKRSYGDESFHFFQIGQESREETLTEDMKEGGTGTELPQLETSAESLAPLESKETVNDEADLVPDDLSEEVEEVPTSDGQLNSQMGISASTETSMKEAASAGAEDLPCIQMSDTPSLSLVKQAALQLDFSTVTRSVYSDRDDESPDSSPEEQKSVIEIPTAPMENVPSTESRSKIPVRTMPTSTPAFPSMECESAPSEGFLPSLDEESQEDETKPKSKIPVKAPVPRVEQQLLHLDSSLQETVAPQGQDVTSRAPDSRSKSESDASPLDAKITCPEKTGSYTETDLESSEGTEELELESEDETTRPKIFASRLPVKSKSTTSSCRGATSPTKESKEHFFDLYRNSIEFFEEISDEASKLVDRLTQSEREQELVSDDESSSALEVSVIENLPPVETEQSIPEDIFDTRPIWDESIETLIERIPDENGHDHAEDQQDEQERIEERLAYIADHLGFSWTELARELDFTEEQIHQIRIENPNSLQDQSHALLKYWLERDGKHATDTNLIECLTKINRMDIVHLMETITEPLQERISHSYAEIEQTITLDHSEGFSVLQEELCTAQNKQKEEQAASKEGESYDHPPIVSEEDISVGYSTFQDSIPKTEGDGSVTELLPKTHEEQVQQDFSGKMQDLPEESSLEQQEYFVTTPGTEASETPKATAAPGSPSKTPEEIITPPEEERPYLQTPTASEQGDSPIVQEPEEPPEHREASLPQKTSLVIVESADDQPQTFERLDEDAAFQKGDDMPDIPPETVTEEEYVDEHGHTVVKKVTRKIIRRYVSSDGTEKEEMTMQGAPQDPISIEEGDGYSKVIKRVVLKSDTERSEVRADFVERCK

SEQ ID NO: 190 - protein, 559 aa, Gallus gallus
MDDLDALLADLESTTSHISKRPVFLTEETPYSYPTGNHTYQEIAVPPPVPPPPSSEALNGTVIDPLDQWQPSVSRYGHQQPQSQSPIYSSSAKSSSASVPRDGLSSPSPRASEEEHVYSFPNKQKSAEPSPTMTSTSLGSNLSELDRLLLELNAVQHNPPSGFSADEVSRSPSLPNVTGPHYVIPESSSSAGGKAAPPTKEKPKRNGGRGIEDVRPSVESLLDELESSVPSPVPAITVSQGEVSSPQRVNASQQQTRISASSATRELDELMASLSDFKFMAQGKAGGSSSPPSTTPKPGSQLDTMLGSLQSDLNKLGVATVAKGVCGACKKPIAGQVVTAMGKTWHPEHFVCTHCQEEIGSRNFFERDGQPYCEKDYHNLFSPRCYYCNGPILDKVVTALDRTWHPEHFFCAQCGVFFGPEGFHEKDGKAYCRKDYFDMFAPKCGGCARAILENYISALNTLWHPECFVCRECFTPFINGSFFEHDGQPYCEVHYHERRGSLCSGCQKPITGRCITAMGKKFHPEHFVCAFCLKQLNKGTFKEQNDKPYCQNCFLKLFC

SEQ ID NO: 191 - protein, 586 aa, Bos taurus
ALLADLESTTSHISKRPVFLSEETPYSYPTGNHTYQEIAVPPVPPPPSSEALNGSVLDPLDPWPPSTSRFTHQQPQSSSPVYGSSAKTSSASNPQDGGGPPCPRAGEEDHVYSFPNKQKSAEPSPTVMSSSLGSNLSELDRLLLELNAVQHNPPGFPADEANSSPPLPGPLSTHYGVPENNSLLGGKAGALTKEKPKRNGGRGLEDLRPSVENLLDELESSVPSPVPTITVNQGEMSSPQRVTSSQQQTRISASSATRELDELMASLSDLSKIQDLEQRADGELCWAAGWPLNGRQSGPEGQDMGGFMAQGKTGSSSPPGGPPKPGSQLDSMLGSLQSDLNKLGVATVAKGVCGACKKPIAGQVVTAMGKTWHPEHFVCTHCQEEIGSRNFFERDGQPYCEKDYHNLFSPRCYYCNGPILDKVVTALDRTWHPEHFFCAQCGAFFGPEGFHEKDGKAYCRKDYFDMFAPKCGGCARAILENYISALNTLWHPECFVCRECFTPFVHGSFFEHEGQPYCEAHYHERRGSLCSGCQKPITGRCITAMAKKFHPEHFVCAFCLKQLNKGTFKEQNDKPYCQNCFLKLFC

SEQ ID NO: 192 - protein, 553 aa, Sus scrofa
DALLADLESTTSHISKRPVFLSEETPYSYPTGNHTYQEIAVPPPVPPPPSSEALNGSVLDPIDQWQPSTSRFIHQQPQAPSPVYGSSAKTSSSSNPQDGIGLPCPRASEEEHVYSFPNKQKSAEPSPTVMSSSLGSNLSELDRLLLELNAVQHNAPGFPTDEANSSPPLPGALSPHYGVLEHNSSLGGKAGPVTKEKPKRNGGRGLEDVRPSVESLLDELESSVPSPVPAITLNQGEMNSPQRVTSSQQQTRISASSATRELDELMASLSDFKFMAQGKTGSSSPPGGPPKPGSQLDSMLGSLQSDLNKLGVATVAKGVCGACKKPIAGQVVTAMGKTWHPEHFVCTHCQEEIGSRNFFERDGQPYCEKDYHNLFSPRCYYCNGPILDKVVTALDRTWHPEHFFCAQCGAFFGPEGFHEKDGKAYCRKDYFDMFAPKCGGCARAILENYISALNTLWHPECFVCRECFTPFVNGSFFEHDGQPYCEVHYHERRGSLCSGCQKPITGRCITAMAKKFHPEHFVCAFCLKQLNKGTFKEQNDKPYCQNCFLKLFC

SEQ ID NO: 193 - protein, 166 aa, Bos mutus
MATSELSCLVSEENCERREAFWAEWKDLTLSTRPEEGCSLHEEDTQRHETYHRQGQCQALVQRSPWLVMRMGILGRGLQEYQLPYQRVLPLPIFTPAKVGTKEEREETPIQLQELLALETALGGQCVDRQDVAEITKQLPPVVPVSKPGTLRRSLSRSMSQEAQRG

SEQ ID NO: 194 - protein, 451 aa, Bos taurus [sequence omitted]

SEQ ID NO: 195 - protein, 1748 aa, Gallus gallus
MLSMEGFVGARALGEESLQMWDLNKRLEAYLARVKFLEEENEGLRAEIQSTKENPAGDPRRARYEEELRSLRDALHRAFTEKCAAELARDNLYEEVQHVRSRCQKEQAAREEAKRQLSSSKKELEEERRAQIWLKERAVQLEKEVEALLEVHEEEKAGLDQELASFSQSLEGFRCAPVAFQPVEVEDYSKRLSEIWRGAVETYKAEVSQLERALGQAKENLWQVAEDNQQSQLQLRHLEKELVGLKVRKEMLEESLGQQWQEQHGEAEKFQLAIEALEQEKQSLQVQIAQVLEDRQQLMHLKMSLSLEVATYRTLLEAESTRLQMPPGEFKLANSLRDVKLEASSSKHRASLAAFPRPEGVAQLCRTPGDALKVLTPKSKSSSALEFQKISSVLQAPRSWEPAAPSPTVPVVSPEPGSGGAESPVHECGAGKESPMLSPLSPEQLVNHALQDALKEMQDDAEAKEVPTLSATQSTRDGDLEATMEEEEAAGTQGVGAEGETVSPPGLCFCSNEPTLLSATQSDVESQEEMWEEERSKEEMLNPLSSMESQEPGGEPWGGVTRRSRLQVGKEDMEATSTEALHISEKKEQREIWSPSREDEECEFPDEEREMQEEGSLQMEIEAACAVPVGSHPVLPTGIHLQEDFLEREQESEHQETSLGELGAAAGEEREQEVCQELKASSIEEAMPAAEGSSGSGEGTTGRESTGRARDDEGEEEDKGREALGEDDLQAGEALGAKELGKESMGLEEAEGMWEESVDLQEEHRDLQEGHGDLQVEHEDLWEEHGHIQEEHGDTQEEYGDTQEEHGDLQVEGGDLQEEHGDTQEEHGDLQEEHGDTQEEHGDLQVEHEDLQVEHGDLWEEHRDVQEEHGDTQEEYGDTQEEHGDLQVEGGDLQEEHGDTQEEHEDLQEEHGDTQEEHGDLQVEHGDLQEEHRDLQEGHGDLKEEHGDLQVEHEDLQVEHGDLQEEHGDTQEEHGDLQEEHGDLQVEHEDLQVEHGDLQVEHGDLQEEHGDTQEEHRDLQEVHGDQQEEHRDLQEGHGDLQEEHGDLQVEHGDLQEEYGDTQEEHRDLQEVHGDQQEEHRNLQEGHGDLQEGHGDLQEEHGDLWKEHGVLKEEHGDLQEGHGDLQEESGDPQEEPGEPWVQHGEQGSAGDGLEQDMVLQPGEGAWGREDNDISQKQQAQDWEGTAEDEEETGVNTITSQEPTQVDDNPHAEAAENEERDVTSPTAMEETQEGEDEGDAGSEVQSQQQPQDTPGQEAEPAPGQKEVRYGDTGEAPGDPQEPAEALEVEDEELSSEPIELERGSPDTAVMQQDLGNGAESDEPMEEDFQSEDAQLEEPKACRMELEDTLLNSTPLCAYSGEMLESDPNPPSSGGDGEAAPEMAQEEEGDLRGSDEAAVHAEPESCEELSPAPECTEEEEGYFIVSAPSQEGSSMEEAENSEEFEEIKVEAAEDRKDELTAPGVASLVPEDEGHSEPFVGEAEDVKMPLGEFEMPKEEDEEDAGGFAAELEEGLTVPVAEGLSEGHTDKTTLGDEGLGEEDVQDGDNPPATETSDTDPSNTDPPPGTMLEHGAGMEAAEYLPDVPTQLPVDIMKDSDILEIVEQALEFNQELVLGAKLAKDGQEEDGDAQPPQEEEGGSSPTSSCDEQPTVQEAVAEPERTKNGEQNGLHRQASLEDLAEFTEEGLNGITHPGEAPAAHTLPLPSKHSGAEPVPELSPLQTTSCARSRSPGPLGRSDAVGPHSPATIGRLP

SEQ ID NO: 196 - protein, 1483 aa, Danio rerio
MSESLKLQKEQEERDLETRYESSYHQSSLSSVSRQSYTAYVSSHGHKISGKKKEKKLTPLSKKEKRSYLAVDKEDEVIGYVVPVFRSSHLATQDLMETQEEVKEEGVGYVVMRNLFARESGFKMRTVKKTRETSMRESAERMALSQKLHEKEQFQKKMNPDSLTHPPEFIVKPRGQTVWEGKSVTLHCTVAGWPKPRVAWYKNNVLIDAKARPEKYFTESQYNMHSLEIKNCTFSDTAEYRISALNVKGESSAFAPVIIKRFKEEEELVERPHGYSPEYGVTFNTTIIDKFDVSFGREGETMSLGCTVIVYPTVKRYQPEIVWYRNGVALSSSKWVHMHWSGEKATLTLVHLNKEDEGLYTLRVNTKSGFDTHSAYVFVRDADVEEEGVPVAPLDVRCHDANKDYVVVTWKQPAVEGSSAITGYFIDRLEVGNHHWTQCNDTPVKYARFPVTGLIEGRSYMFRVRALNNAGVSRPSRVSDPVVAMDPSDRARLRAGPSAPWTGVIKFTEEDPTVGVIPGPPTDLAVTEATKSYVVLSWKPPVQRGHEGVMYYVEKCLVGTDAWQRVNTGIPVKSPRFALFDLAEDKSYTFRVRSCNSAGVGEPSEETGATTVGDRLDLPSAPGPVIPIRNTDSSVVVCWGASKEVKDLVGYYIEVTVDGSGVWAPCNNKPVKGTRFVCHGLNATDKCTFRVKAVNAAGYSGSSAESEACLVKASIAVPSPPTGVTTLERLRDYMVIGWQAPAKTGGADIRGYYLDYRTVKDGVTSKWHELNLKAVTSSPYKVTDLKENEFYQFQVRAFNQAGISEASIPTAPLECKEWTVAVPGPPHGLRVQEVRKDSMVVLWEPPTFNGRSPVTGYYVDFKEENGRWRCVQERSTKHTYMKVSGLQEGISYRLRIHAKNLAGVGVPSKATDAILAETRPGTNEIVVDVDDNGVISLIFECSDLKEDSQFVWSKNYEAFTDSSRLTIQTTGGKSRAIFNDPSLDDLGIYSCVVTNTDGVSASYTLTEEGLKRLLDISHDHQFPIIPFKSEMAIELQEKGRVRFWAEVGKFTSNLQVEYVFNDNVIHEGKKYTMNFNKSTGIIEMFMDLLEVTDEGTFTFNLVDGKATGRTSLVLIGEEFAELQKKSEFERAEWVRRQGPHFVEYLSFEVTPECDVHLKCKVGNIKPATEIAWFKDGIEIEEDDEDAKKIGKSDEVLTFDIGKLVIKSEKAERKKKPATEESPSKPKISKKDAGVYEVKLKDERGKDKTLLNLTDAGYQAVLNEVFRVIANSSTELKVMSTEHGIILYSFVVHYLEDLRVGWLHKESKISHSDRVQCGVTGEQLWLKINEPTEKDKGKYAIDIFDGKGSVKRVLDLSGQVWEEAFEEFKRLKAAAIAERNRARVVGGLPDVVTIQEGKSLNLTGNVWGDPAPEVSWIKNEKPLVCDEHHTLKYEHSKFASITIAAVTTTDSGKYALLVKNKYGTEAAEFTVSVYIPEDEAEKKE

SEQ ID NO: 197 - DNA, 501 bp, Artificial Sequence; identical to SEQ ID NO: 2
  Description of Artificial Sequence: Synthetic polynucleotide

SEQ ID NO: 198 - DNA, 423 bp, Artificial Sequence; identical to SEQ ID NO: 4
  Description of Artificial Sequence: Synthetic polynucleotide

SEQ ID NO: 199 - DNA, 1416 bp, Artificial Sequence; identical to SEQ ID NO: 6
  Description of Artificial Sequence: Synthetic polynucleotide

SEQ ID NO: 200 - DNA, 882 bp, Artificial Sequence; identical to SEQ ID NO: 8
  Description of Artificial Sequence: Synthetic polynucleotide

SEQ ID NO: 201 - DNA, 483 bp, Artificial Sequence; identical to SEQ ID NO: 10
  Description of Artificial Sequence: Synthetic polynucleotide

SEQ ID NO: 202 - DNA, 501 bp, Artificial Sequence; identical to SEQ ID NO: 11
  Description of Artificial Sequence: Synthetic polynucleotide

SEQ ID NO: 203 - protein, 192 aa, Bos taurus
MAPKKDVKKPAAAAAPAPAPAPAPAPAPAPPKEEKIDLSAIKIEFSKQQQDEFKEAFLLFDRTGECKITLSQVGDVLRALGTNPTNAEVKKVLGNPSNEEMNAKKIEFEQFLPMLQAISNNKDQGTYEDFVEGLRVFDKEGNGTVMGAELRHVLATLGEKMKEEEVEALMAGQEDSNGCINYEAFVKHIMSN

SEQ ID NO: 204 - protein, 264 aa, Bos taurus
MLSHNTMVKQRKQQASAIMKEIHGNDVDVMHLGKKVSIPRDIMLEELSHLSNRGARLFKMRQRRSDKYTFENFQYETKAQINHNIAMQNEKLDGINLESGSQQAPFTPPNTPDPRSPPNPENIAPGYSGPLKEIPPERFNTTAVPKYYQSPWEQAISNDPELLEALYPKFFKPEGKAELPDYRSFNRVATPFGGFEKASKMVKFKVPDFDLLLLTDPRFMAFANPLSGRRSFNRTPKGWISENIPIVITTEPTEDNTIPESEDL

1.-176. (canceled)

177. A pet food or animal feed composition comprising a yeast cell or filamentous fungal cell that expresses at least one recombinant animal protein.

178. The composition of claim 177, wherein the composition is substantially free of antibiotics, animal growth hormones, and animal meat.

179. The composition of claim 177, wherein the recombinant animal protein has a maximum amino acid sequence identity of 70% to any protein naturally encoded in the genome of the yeast cell or filamentous fungal cell that expresses the recombinant animal protein.

180. The composition of claim 177, wherein the recombinant protein is profilin, cofilin, coronin, myozenin, troponin, radixin, myotubularin, gamma-sarcoglycan, alpha-actinin, caveolin, desmin, tropomyosin, titin, connectin, transgelin, smoothelin, actin or myosin.

181. The composition of claim 177, wherein the recombinant animal protein is a protein of a chicken, a pig, a turkey, a pheasant, a quail, a horse, cattle, a fish, a shrimp, a prawn, a crab, a sheep, a deer, a duck, a rabbit, an elk, a moose, a kangaroo, an alligator, a wild boar, a goat, a bison, a buffalo, a bear, or an elephant.

182. The composition of claim 177, wherein the recombinant animal protein is a poultry protein, even-toed ungulate protein, or fish protein.

183. The composition of claim 177, wherein the recombinant animal protein is a cytoskeletal protein.

184. The composition of claim 177, wherein the recombinant animal protein is a muscle protein.

185. The composition of claim 177, wherein the recombinant animal protein is a skeletal muscle protein.

186. The composition of claim 177, wherein the composition comprises a yeast cell or a filamentous fungal cell that expresses at least two different recombinant animal proteins.

187. The composition of claim 177, wherein the composition comprises at least two different yeast or filamentous fungal cells that each express at least one different recombinant animal protein.

188. The composition of claim 177, wherein the composition comprises about 1% to 30% of the recombinant protein based on the dry weight of the composition.

189. The composition of claim 177, wherein the composition comprises about 5% to 40% of the recombinant protein based on the dry weight of the composition.

190. The composition of claim 177, wherein the composition further comprises a fat, a carbohydrate, a non-recombinant protein, a fiber, a nutritional supplement, a palatability agent, or any combination thereof.

191. The composition of claim 177, wherein the composition comprises 5-50% protein, 0-50% fat, 0-75% carbohydrate, 0-40% dietary fiber, and 0-15% of other nutrients.

192. The composition of claim 177, wherein the composition is nutritionally balanced for a companion animal, optionally wherein the composition is a kibble.

193. A method for producing a pet food or animal feed composition according to claim 1, the method comprising culturing yeast or filamentous fungal cells that express an animal protein and processing the cells to provide the pet food or animal feed composition.

194. The method of claim 193, wherein processing the cells comprises combining the cells with a fat, a carbohydrate, a non recombinant protein, a fiber, a nutritional supplement, a palatability agent, or any combination thereof;
or dehydrating, baking, and/or extruding the yeast or filamentous fungal cells, optionally combined with a fat, a carbohydrate, a non recombinant protein, a fiber, a nutritional supplement, a palatability agent, or any combination thereof.

195. The method of claim 194, wherein the method comprises lysing the yeast or filamentous fungal cells.

196. The method of claim 193, wherein the method comprises isolating, purifying, and/or concentrating, the animal protein.
